(19) United States
(12) Patent Application Publication
(10) Pub. No.: US 2022/0112446 A1
(43) Pub. Date: Apr. 14, 2022

(54) CLEANING COMPOSITION COMPRISING AN ALPHA-DIOXYGENASE

(71) Applicant: The Procter & Gamble Company, Cincinnati, OH (US)

(72) Inventors: Juan Esteban Velasquez, Cincinnati, OH (US); Spencer Christopher Rupard, Morrow, OH (US); Denis Alfred Gonzales, Brussels (BE)

(21) Appl. No.: 17/066,551

(22) Filed: Oct. 9, 2020

(51) Int. Cl. C11D 3/386; A61K 8/66; A61Q 5/02; C11D 11/00; C12N 9/02

(52) U.S. Cl. CPC C11D 3/38654; A61K 8/66; C12N 9/0069; C11D 11/0023; C11D 3/38618; A61Q 5/02

(57) ABSTRACT

Cleaning compositions having fatty acid alpha-dioxygenases and methods of using said compositions to provide a benefit by converting long chain fatty acids present in soils into 2-hydroperoxy fatty acids or terminal aldehydes.

### REFERENCE TO A SEQUENCE LISTING

[0001] This application contains a Sequence Listing in computer readable form. The computer readable form is incorporated herein by reference.

### FIELD OF THE INVENTION

[0002] The present invention relates to methods of transforming soil comprising fatty acids and cleaning compositions comprising a fatty acid alpha-dioxygenase.

### BACKGROUND OF THE INVENTION

[0003] Cleaning compositions, such as those for cleaning surfaces or garments, should usually have a good soil and/or grease cleaning and/or suds profile especially in the presence of greasy soils. Users usually see cleaning performance and suds profiles as indicators of the quality of the cleaning composition. Moreover, the user of a cleaning composition may also use the suds profile and the appearance of the suds (e.g., density, whiteness) as an indicator that the wash solution still contains active cleaning ingredients. Accordingly, it is desirable for certain cleaning composition to provide “good sudsing profile”, which includes good suds height and/or density as well as good suds duration during the initial mixing of the composition with water and/or during the entire washing operation.

[0004] It has been found that some types of soil, in particular greasy soils comprising fatty acids, can act as a suds suppressor, triggering consumers to replace the product more frequently than is necessary. As such there is a need to provide cleaning compositions with desirable suds properties, especially in the presence of greasy soils, even more in the presence of greasy soils comprising fatty acids, and that at the same time provide good soil and grease removal.

[0005] There is also a desire to utilize less surfactant materials in cleaning compositions. However, using less surfactant can decrease the suds generation and/or cleaning performance of the cleaning composition.

[0006] There remains a desire to provide cleaning compositions which provide effective suds generation and/or cleaning performance in the presence of soils comprising fatty acids, especially when the cleaning composition contains relatively low amounts of surfactant in the composition.

### SUMMARY OF THE INVENTION

[0007] A cleaning composition is provided that comprises a fatty acid alpha-dioxygenase; wherein said alpha-dioxygenase comprises a polypeptide sequence having at least about 70%, identity to one or more sequences selected from the group consisting of: SEQ ID NO: 1, 2, 3, 4, 5, 6, 7, 15, 16, 17, 18, 19, 20, 21, 22, 23, 24, 25, 26, 27, 28, 29, 30, 31, 32, 33, 34, 35, 36, 37, 38, 39, 40, 41, 42, 43, 44, 45, 46, 47, 48, 49, 50, 51, 52, 53, 54, 55, 56, 57, 58, 71, 72, 73, 74, 75, 76, 77, 78, 79, 80, 81, 82, 83, 84, 85, 86, 87, 88, 89, 90, 91, 92, 93, 94, 95, 96, 97, 98, 99, 100, 101, 102, 103, 104, 105, 106, 107, 108, 109, 110, 111, 112, 113, 114, 115, 116, 117, 118, 119, 120, 121, 122, 123, 124, 125, 126, 127, 128, 129, 130, 131, 132, 133, 134, 135, 136, 137, 138, 139, 140, 141, 142, 143, 144, 145, 146, 147, 148, 149, 150, 151, 152, 153, 154, 155, 156, 157, 158, 159, 160, 161, 162, 163, 164, 165, 166, 167, 168, 169, 170, 171, 172, 173, 174, 175, 176, 177, 178, 179, 180, 181, 182, 183, 184, 185, 186, 187, 188, 189, 190, 191, 192, 193, 194, 195, 196, 197, 198, 199, 200, 201, 202, 203, 204, 205, 206, 207, 208, 209, 210, 211, 212, 213, 214, 215, 216, 217, 218, 219, 220, 221, 222, 223, 224, 225, 226, 227, 228, 229, 230, 231, 232, 233, 234, 235, 236, 237, 238, 239, 240, 241, 242, 243, 244, 245, 246, 247, and their functional fragments thereof; preferably SEQ ID NO: 1, 2, 15, 16, 17, 18, 19, 20, 21, 22, 23, 24, 25, 26, 27, 28, 29, 30, 31, 32, 33, 34, 35, 36, 37, 38, 39, 40, 41, 42, 43, 44, 45, 46, 47, 48, 49, 50, 51, 52, 53, 54, 55, 56, 57, 58, 59, 60, 61, 62, 63, 64, 65, 66, 67, 68, 69, 70, and their functional fragments thereof; more preferably SEQ ID NO: 1, 15, 16, 17, 18, 19, 20, 21, 22, 23, 24, 25, 26, 27, 28, 29, 30, 31, 32, 33, 34, 35, 36, 37, 38, 39, 40, 41, 42, 43, 44, 45, 46, 47, 48, 49, 50, 51, 52, 53, 54, 55, 56, 57, 58; most preferably SEQ ID NO: 1.

[0008] Cleaning compositions are provided that comprise a fatty acid alpha-dioxygenase; wherein said alpha-dioxygenase comprises a polypeptide sequence having at least about 70% identity to one or more sequences selected from the group consisting of: SEQ ID NO: 1, 2, 3, 4, 5, 6, 7, and their functional fragments thereof; preferably SEQ ID NO: 1, 2, and their functional fragments; and most preferably SEQ ID NO: 1, and its functional fragments.

[0009] Cleaning compositions are provided that comprise a fatty acid alpha-dioxygenase; wherein said alpha-dioxygenase comprises a polypeptide sequence having at least about 90%, 95%, 98%, 100% identity to one or more sequences selected from the group consisting of: SEQ ID NO: 1, 2, 3, 4, 5, 6, 7, 15, 16, 17, 18, 19, 20, 21, 22, 23, 24, 25, 26, 27, 28, 29, 30, 31, 32, 33, 34, 35, 36, 37, 38, 39, 40, 41, 42, 43, 44, 45, 46, 47, 48, 49, 50, 51, 52, 53, 54, 55, 56, 57, 58, 71, 72, 73, 74, 75, 76, 77, 78, 79, 80, 81, 82, 83, 84, 85, 86, 87, 88, 89, 90, 91, 92, 93, 94, 95, 96, 97, 98, 99, 100, 101, 102, 103, 104, 105, 106, 107, 108, 109, 110, 111, 112, 113, 114, 115, 116, 117, 118, 119, 120, 121, 122, 123, 124, 125, 126, 127, 128, 129, 130, 131, 132, 133, 134, 135, 136, 137, 138, 139, 140, 141, 142, 143, 144, 145, 146, 147, 148, 149, 150, 151, 152, 153, 154, 155, 156, 157, 158, 159, 160, 161, 162, 163, 164, 165, 166, 167, 168, 169, 170, 171, 172, 173, 174, 175, 176, 177, 178, 179, 180, 181, 182, 183, 184, 185, 186, 187, 188, 189, 190, 191, 192, 193, 194, 195, 196, 197, 198, 199, 200, 201, 202, 203, 204, 205, 206, 207, 208, 209, 210, 211, 212, 213, 214, 215, 216, 217, 218, 219, 220, 221, 222, 223, 224, 225, 226, 227, 228, 229, 230, 231, 232, 233, 234, 235, 236, 237, 238, 239, 240, 241, 242, 243, 244, 245, 246, 247, and their functional fragments thereof; preferably SEQ ID NO: 1, 2, 15, 16, 17, 18, 19, 20, 21, 22, 23, 24, 25, 26, 27, 28, 29, 30, 31, 32, 33, 34, 35, 36, 37, 38, 39, 40, 41, 42, 43, 44, 45, 46, 47, 48, 49, 50, 51, 52, 53, 54, 55, 56, 57, 58, 59, 60, 61, 62, 63, 64, 65, 66, 67, 68, 69, 70, and their functional fragments thereof; more preferably SEQ ID NO: 1, 15, 16, 17, 18, 19, 20, 21, 22, 23, 24, 25, 26, 27, 28, 29, 30, 31, 32, 33, 34, 35, 36, 37, 38, 39, 40, 41, 42, 43, 44, 45, 46, 47, 48, 49, 50, 51, 52, 53, 54, 55, 56, 57, 58; most preferably SEQ ID NO: 1.

[0010] Methods of cleaning a surface having disposed thereon a soil comprising fatty acid are provided wherein the method comprises: a) contacting said soil disposed on said surface with a cleaning composition comprising a fatty acid alpha-dioxygenase; wherein said alpha-dioxygenase comprises a polypeptide sequence having at least about 70% identity to one or more sequences selected from the group consisting of: SEQ ID NO: 1, 2, 3, 4, 5, 6, 7, and their functional fragments thereof; preferably SEQ ID NO: 1, 2, and their functional fragments; and most preferably SEQ ID NO: 1, and its functional fragments; and b) converting said fatty acid of said soil on said surface into a material selected from the group consisting of 2-hydroperoxy fatty acids, 2-hydroperoxy fatty acid derivatives, and mixtures thereof.

### BRIEF DESCRIPTION OF THE DRAWINGS

[0011] While the specification concludes with claims particularly pointing out and distinctly claiming the subject matter that is regarded as the present disclosure, it is believed that the disclosure will be more fully understood from the following description taken in conjunction with the accompanying drawings.

[0012] FIG. Illustration of Sequence Similarity.

### DETAILED DESCRIPTION OF THE INVENTION

### Definitions

[0013] As used herein, the articles “a” and “an” when used in a claim, are understood to mean one or more of what is claimed or described.

[0014] As used herein, the term “substantially free of” or “substantially free from” means that the indicated material is present in an amount of no more than about 5 wt %, preferably no more than about 2%, and more preferably no more than about 1 wt % by weight of the composition.

[0015] As used therein, the term “essentially free of” or “essentially free from” means that the indicated material is present in an amount of no more than about 0.1 wt % by weight of the composition, or preferably not present at an analytically detectible level in such composition. It may include compositions in which the indicated material is present only as an impurity of one or more of the materials deliberately added to such compositions.

[0016] All percentages and ratios used hereinafter are by weight of total composition, unless otherwise indicated. All percentages, ratios, and levels of ingredients referred to herein are based on the actual amount of the ingredient, and do not include solvents, fillers, or other materials with which the ingredient may be combined as a commercially available product, unless otherwise indicated.

[0017] As used herein, the terms “protein,” “polypeptide,” and “peptide” are used interchangeably herein to denote a polymer of at least two amino acids covalently linked by an amide bond, regardless of length or post-translational modification (e.g., glycosylation, phosphorylation, lipidation, myristoylation, ubiquitination, etc.). Included within this definition are D- and L-amino acids, and mixtures of D- and L-amino acids.

[0018] As used herein, “polynucleotide” and “nucleic acid” refer to two or more nucleosides that are covalently linked together. The polynucleotide may be wholly comprised ribonucleosides (i.e., an RNA), wholly comprised of 2′ deoxyribonucleosides (i.e., a DNA) or mixtures of ribo- and 2′ deoxyribonucleosides. While the nucleosides will typically be linked together via standard phosphodiester linkages, the polynucleotides may include one or more non-standard linkages. The polynucleotide may be single-stranded or double-stranded, or may include both single-stranded regions and double-stranded regions. Moreover, while a polynucleotide will typically be composed of the naturally occurring encoding nucleobases (i.e., adenine, guanine, uracil, thymine, and cytosine), it may include one or more modified and/or synthetic nucleobases (e.g., inosine, xanthine, hypoxanthine, etc.). Such modified or synthetic nucleobases can be encoding nucleobases.

[0019] As used herein, “coding sequence” refers to that portion of a nucleic acid (e.g., a gene) that encodes an amino acid sequence of a protein.

[0020] As used herein, “naturally occurring,” “wild-type,” and “WT” refer to the form found in nature. For example, a naturally occurring or wild-type polypeptide or polynucleotide sequence is a sequence present in an organism that can be isolated from a source in nature and which has not been intentionally modified by human manipulation.

[0021] As used herein, “non-naturally occurring” or “engineered” or “recombinant” when used in the present invention with reference to (e.g., a cell, nucleic acid, or polypeptide), refers to a material, or a material corresponding to the natural or native form of the material, that has been modified in a manner that would not otherwise exist in nature, or is identical thereto but produced or derived from synthetic materials and/or by manipulation using recombinant techniques. Non-limiting examples include, among others, recombinant cells expressing genes that are not found within the native (non-recombinant) form of the cell or express native genes that are otherwise expressed at a different level.

[0022] As used herein the term “identity” means the identity between two or more sequences and is expressed in terms of the identity or similarity between the sequences as calculated over the entire length of a sequence aligned against the entire length of the reference sequence. Sequence identity can be measured in terms of percentage identity; the higher the percentage, the more identical the sequences are. The percentage identity is calculated over the length of comparison. For example, the identity is typically calculated over the entire length of a sequence aligned against the entire length of the reference sequence. Methods of alignment of sequences for comparison are well known in the art and identity can be calculated by many known methods. Various programs and alignment algorithms are described in the art. It should be noted that the terms ‘sequence identity’ and ‘sequence similarity’ can be used interchangeably.

[0023] As used herein, “percentage of sequence identity,” “percent identity,” and “percent identical” refer to comparisons between polynucleotide sequences or polypeptide sequences, and are determined by comparing two optimally aligned sequences over a comparison window, wherein the portion of the polynucleotide or polypeptide sequence in the comparison window may comprise additions or deletions (i.e., gaps) as compared to the reference sequence for optimal alignment of the two sequences. The percentage is calculated by determining the number of positions at which either the identical nucleic acid base or amino acid residue occurs in both sequences or a nucleic acid base or amino acid residue is aligned with a gap to yield the number of matched positions, dividing the number of matched positions by the total number of positions in the window of comparison and multiplying the result by 100 to yield the percentage of sequence identity.

[0024] As used herein, the term “variant” of fatty acid alpha-dioxygenase enzyme means a modified fatty acid alpha-dioxygenase enzyme amino acid sequence by or at one or more amino acids (for example 1, 2, 3, 4, 5, 6, 7, 8, 9 or 10 or more amino acid modifications) selected from substitutions, insertions, deletions and combinations thereof. The variant may have “conservative” substitutions, wherein a substituted amino acid has similar structural or chemical properties to the amino acid that replaces it, for example, replacement of leucine with isoleucine. A variant may have “non-conservative” changes, for example, replacement of a glycine with a tryptophan. Variants may also include sequences with amino acid deletions or insertions, or both. Guidance in determining which amino acid residues may be substituted, inserted, or deleted without abolishing the activity of the protein may be found using computer programs well known in the art. Variants may also include truncated forms derived from a wild-type fatty acid alpha-dioxygenase enzyme, such as for example, a protein with a truncated N-terminus. Variants may also include forms derived by adding an extra amino acid sequence to a wild-type protein, such as for example, an N-terminal tag, a C-terminal tag or an insertion in the middle of the protein sequence.

[0025] As used herein, “reference sequence” refers to a defined sequence to which another sequence is compared. A reference sequence may be a subset of a larger sequence, for example, a segment of a full-length gene or polypeptide sequence. Generally, a reference sequence is at least 20 nucleotide or amino acid residues in length, at least 25 residues in length, at least 50 residues in length, or the full length of the nucleic acid or polypeptide. Since two polynucleotides or polypeptides may each (1) comprise a sequence (i.e., a portion of the complete sequence) that is similar between the two sequences, and (2) may further comprise a sequence that is divergent between the two sequences, sequence comparisons between two (or more) polynucleotides or polypeptide are typically performed by comparing sequences of the two polynucleotides over a comparison window to identify and compare local regions of sequence similarity. The term “reference sequence” is not intended to be limited to wild-type sequences, and can include engineered or altered sequences. For example, a “reference sequence” can be a previously engineered or altered amino acid sequence.

[0026] As used herein, “comparison window” refers to a conceptual segment of at least about 20 contiguous nucleotide positions or amino acids residues wherein a sequence may be compared to a reference sequence of at least 20 contiguous nucleotides or amino acids and wherein the portion of the sequence in the comparison window may comprise additions or deletions (i.e., gaps) of 20 percent or less as compared to the reference sequence (which does not comprise additions or deletions) for optimal alignment of the two sequences. The comparison window can be longer than 20 contiguous residues, and includes, optionally 30, 40, 50, 100, or longer windows.

[0027] As used herein, “corresponding to”, “reference to” or “relative to” when used in the context of the numbering of a given amino acid or polynucleotide sequence refers to the numbering of the residues of a specified reference sequence when the given amino acid or polynucleotide sequence is compared to the reference sequence. In other words, the residue number or residue position of a given polymer is designated with respect to the reference sequence rather than by the actual numerical position of the residue within the given amino acid or polynucleotide sequence. For example, a given amino acid sequence, such as that of an engineered fatty acid alpha-dioxygenase, can be aligned to a reference sequence by introducing gaps to optimize residue matches between the two sequences. In these cases, although the gaps are present, the numbering of the residue in the given amino acid or polynucleotide sequence is made with respect to the reference sequence to which it has been aligned.

[0028] As used herein, “increased enzymatic activity” and “increased activity” refer to an improved property of a wild-type or an engineered enzyme, which can be represented by an increase in specific activity (e.g., product produced/time/weight protein) or an increase in percent conversion of the substrate to the product (e.g., percent conversion of starting amount of substrate to product in a specified time period using a specified amount of fatty acid alpha-dioxygenase) as compared to a reference enzyme. Any property relating to enzyme activity may be affected, including the classical enzyme properties of Km, Vmax or kcat, changes of which can lead to increased enzymatic activity. The fatty acid alpha-dioxygenase activity can be measured by any one of standard assays used for measuring fatty acid alpha-dioxygenases, such as change in substrate or product concentration. Comparisons of enzyme activities are made using a defined preparation of enzyme, a defined assay under a set condition, and one or more defined substrates, as further described in detail herein. Generally, when enzymes in cell lysates are compared, the numbers of cells and the amount of protein assayed are determined as well as use of identical expression systems and identical host cells to minimize variations in amount of enzyme produced by the host cells and present in the lysates.

[0029] As used herein, “conversion” refers to the enzymatic transformation of a substrate to the corresponding product.

[0030] As used herein “percent conversion” refers to the percent of the substrate that is converted to the product within a period of time under specified conditions. Thus, for example, the “enzymatic activity” or “activity” of a fatty acid alpha-dioxygenase polypeptide can be expressed as “percent conversion” of the substrate to the product.

[0031] As used herein, “amino acid difference” or “residue difference” refers to a difference in the amino acid residue at a position of a polypeptide sequence relative to the amino acid residue at a corresponding position in a reference sequence. The positions of amino acid differences generally are referred to herein as “Xn”, where n refers to the corresponding position in the reference sequence upon which the residue difference is based. For example, a “residue difference at position X46 as compared to SEQ ID NO: 1” refers to a difference of the amino acid residue at the polypeptide position corresponding to position 46 of SEQ ID NO:1. Thus, if the reference polypeptide of SEQ ID NO:1 has a tyrosine at position 40, then a “residue difference at position X46 as compared to SEQ ID NO:1” refers to an amino acid substitution of any residue other than tyrosine at the position of the polypeptide corresponding to position 46 of SEQ ID NO:1. In most instances herein, the specific amino acid residue difference at a position is indicated as “XnY” where “Xn” specified the corresponding position as described above, and “Y” is the single letter identifier of the amino acid found in the engineered polypeptide (i.e., the different residue than in the reference polypeptide). In some instances, the present invention also provides specific amino acid differences denoted by the conventional notation “AnB”, where A is the single letter identifier of the residue in the reference sequence, “n” is the number of the residue position in the reference sequence, and B is the single letter identifier of the residue substitution in the sequence of the engineered polypeptide. In some instances, a polypeptide of the present invention can include at least one amino acid residue difference relative to a reference sequence, which is indicated by a list of the specified positions where residue differences are present relative to the reference sequence. In embodiments, where more than one amino acid can be used in a specific residue position of a polypeptide, the various amino acid residues that can be used are separated by a “I” (e.g., X46A/G). The present invention includes engineered polypeptide sequences comprising at least one amino acid difference that include either/or both conservative and non-conservative amino acid substitutions. The amino acid sequences of the specific recombinant fatty acid alpha-dioxygenase polypeptides included in the Sequence Listing of the present invention include an initiating methionine (M) residue (i.e., M represents residue position 1). The skilled artisan, however, understands that this initiating methionine residue can be removed by biological processing machinery, such as in a host cell or in vitro translation system, to generate a mature protein lacking the initiating methionine residue, but otherwise retaining the enzyme's properties. Consequently, the term “amino acid residue difference relative to SEQ ID NO:1 at position Xn” as used herein may refer to position “Xn” or to the corresponding position (e.g., position (X-1)n) in a reference sequence that has been processed so as to lack the starting methionine.

[0032] The term “amino acid substitution set” or “substitution set” refers to a group of amino acid substitutions in a polypeptide sequence, as compared to a reference sequence. A substitution set can have 2, 3, 4, 5, 6, 7, 8, 9, 10, 11, 12, 13, 14, 15, or more amino acid substitutions. In embodiments, a substitution set refers to the set of amino acid substitutions that is present in any of the variant fatty acid alpha-dioxygenases.

[0033] As used herein, the phrase “conservative amino acid substitutions” refers to the interchangeability of residues having similar side chains, and thus typically involves substitution of the amino acid in the polypeptide with amino acids within the same or similar defined class of amino acids. As such, an amino acid with an aliphatic side chain can be substituted with another aliphatic amino acid (e.g., alanine, valine, leucine, and isoleucine); an amino acid with a hydroxyl side chain can be substituted with another amino acid with a hydroxyl side chain (e.g., serine and threonine); an amino acids having aromatic side chains can be substituted with another amino acid having an aromatic side chain (e.g., phenylalanine, tyrosine, tryptophan, and histidine); an amino acid with a basic side chain can be substituted with another amino acid with a basic side chain (e.g., lysine and arginine); an amino acid with an acidic side chain can be substituted with another amino acid with an acidic side chain (e.g., aspartic acid or glutamic acid); and/or a hydrophobic or hydrophilic amino acid can be replaced with another hydrophobic or hydrophilic amino acid, respectively. The appropriate classification of any amino acid or residue will be apparent to those of skill in the art, especially in light of the detailed invention provided herein.

[0034] As used herein, the phrase “non-conservative substitution” refers to substitution of an amino acid in the polypeptide with an amino acid with significantly differing side chain properties. Non-conservative substitutions may use amino acids between, rather than within, the defined groups and affects (a) the structure of the peptide backbone in the area of the substitution (e.g., proline for glycine) (b) the charge or hydrophobicity, or (c) the bulk of the side chain. By way of example and not limitation, an exemplary non-conservative substitution can be an acidic amino acid substituted with a basic or aliphatic amino acid; an aromatic amino acid substituted with a small amino acid; and a hydrophilic amino acid substituted with a hydrophobic amino acid.

[0035] As used herein, “deletion” refers to modification of the polypeptide by removal of one or more amino acids from the reference polypeptide. Deletions can comprise removal of 1 or more amino acids, 2 or more amino acids, 5 or more amino acids, 10 or more amino acids, 15 or more amino acids, or 20 or more amino acids, up to 10% of the total number of amino acids, or up to 20% of the total number of amino acids making up the polypeptide while retaining enzymatic activity and/or retaining the improved properties of an engineered enzyme. Deletions can be directed to the internal portions and/or terminal portions of the polypeptide. The deletion can comprise a continuous segment or can be discontinuous.

[0036] As used herein, “insertion” refers to modification of the polypeptide by addition of one or more amino acids to the reference polypeptide. In embodiments, the improved engineered fatty acid alpha-dioxygenase enzymes comprise insertions of one or more amino acids to the naturally occurring fatty acid alpha-dioxygenase polypeptide as well as insertions of one or more amino acids to engineered fatty acid alpha-dioxygenase polypeptides. Insertions can be in the internal portions of the polypeptide, or to the carboxy or amino terminus. Insertions as used herein include fusion proteins as is known in the art. The insertion can be a contiguous segment of amino acids or separated by one or more of the amino acids in the naturally occurring polypeptide.

[0037] As used herein, “fragment” refers to a polypeptide that has an amino-terminal and/or carboxy-terminal deletion, but where the remaining amino acid sequence is identical to the corresponding positions in the sequence. Fragments can typically have about 80%, about 90%, about 95%, about 98%, or about 99% of the full-length fatty acid alpha-dioxygenase polypeptide, for example, the polypeptide of SEQ ID NO: 1. In embodiments, the fragment is “biologically active” (i.e., it exhibits the same enzymatic activity as the full-length sequence).

[0038] A “functional fragment”, or a “biologically active fragment”, used interchangeably, herein refers to a polypeptide that has an amino-terminal and/or carboxy-terminal deletion(s) and/or internal deletions, but where the remaining amino acid sequence is identical to the corresponding positions in the sequence to which it is being compared and that retains substantially all of the activity of the full-length polypeptide.

[0039] As used herein, “isolated polypeptide” refers to a polypeptide which is substantially separated from other contaminants that naturally accompany it (e.g., protein, lipids, and polynucleotides). The term embraces polypeptides which have been removed or purified from their naturally-occurring environment or expression system (e.g., host cell or in vitro synthesis). The improved fatty acid alpha-dioxygenase enzymes may be present within a cell, present in the cellular medium, or prepared in various forms, such as lysates or isolated preparations. As such, in embodiments, the wild-type or engineered fatty acid alpha-dioxygenase polypeptides of the present invention can be an isolated polypeptide.

[0040] As used herein, “substantially pure polypeptide” refers to a composition in which the polypeptide species is the predominant species present (i.e., on a molar or weight basis it is more abundant than any other individual macromolecular species in the composition), and is generally a substantially purified composition when the object species comprises at least about 50 percent of the macromolecular species present by mole or % weight. Generally, a substantially pure wild-type or engineered fatty acid alpha-dioxygenase polypeptide composition will comprise about 60% or more, about 70% or more, about 80% or more, about 90% or more, about 91% or more, about 92% or more, about 93% or more, about 94% or more, about 95% or more, about 96% or more, about 97% or more, about 98% or more, or about 99% of all macromolecular species by mole or % weight present in the composition. Solvent species, small molecules (<500 Daltons), and elemental ion species are not considered macromolecular species. In embodiments, the isolated improved fatty acid alpha-dioxygenase polypeptide is a substantially pure polypeptide composition.

[0041] As used herein, when used with reference to a nucleic acid or polypeptide, the term “heterologous” refers to a sequence that is not normally expressed and secreted by an organism (e.g., a wild-type organism). The term can encompass a sequence that comprises two or more subsequences which are not found in the same relationship to each other as normally found in nature, or is recombinantly engineered so that its level of expression, or physical relationship to other nucleic acids or other molecules in a cell, or structure, is not normally found in nature. For instance, a heterologous nucleic acid is typically recombinantly produced, having two or more sequences from unrelated genes arranged in a manner not found in nature (e.g., a nucleic acid open reading frame (ORF) of the invention operatively linked to a promoter sequence inserted into an expression cassette, such as a vector). “Heterologous polynucleotide” can refer to any polynucleotide that is introduced into a host cell by laboratory techniques, and includes polynucleotides that are removed from a host cell, subjected to laboratory manipulation, and then reintroduced into a host cell.

[0042] As used herein, “codon optimized” refers to changes in the codons of the polynucleotide encoding a protein to those preferentially used in a particular organism such that the encoded protein is efficiently expressed in the organism of interest. In embodiments, the polynucleotides encoding the fatty acid alpha-dioxygenase enzymes may be codon optimized for optimal production from the host organism selected for expression.

[0043] As used herein, “suitable reaction conditions” refer to those conditions in the biocatalytic reaction solution (e.g., ranges of enzyme loading, substrate loading, temperature, pH, buffers, co-solvents, etc.) under which a fatty acid alpha-dioxygenase polypeptide of the present invention is capable of converting a substrate compound to a product compound (e.g., conversion of one compound to another compound).

[0044] As used herein, “substrate” in the context of a biocatalyst mediated process refers to the compound or molecule acted on by the biocatalyst.

[0045] As used herein “product” in the context of a biocatalyst mediated process refers to the compound or molecule resulting from the action of the biocatalyst.

[0046] By “cleaning composition”, as used herein, it is meant compositions for treating hair (human, dog, and/or cat), including bleaching, coloring, dyeing, conditioning, growing, removing, retarding growth, shampooing, and styling; personal cleansing; color cosmetics; products relating to treating skin (human, dog, and/or cat), including creams, lotions, ointments, and other topically applied products for consumer use; products relating to orally administered materials for enhancing the appearance of hair, skin, and/or nails (human, dog, and/or cat); shaving; body sprays; fine fragrances such as colognes and perfumes; compositions for treating fabrics, hard surfaces and any other surfaces in the area of fabric and home care, including air care, car care, dishwashing, fabric conditioning (including softening), fabric freshening, laundry detergents, laundry and rinse additive and/or care, hard surface cleaning and/or treatment, and other cleaning for consumer or institutional use; products relating to disposable absorbent and/or non-absorbent articles including adult incontinence garments, bibs, diapers, training pants, infant and toddler care wipes; hand soaps; products relating to oral care compositions including toothpastes, tooth gels, mouth rinses, denture adhesives, and tooth whitening; personal health care medications; products relating to grooming including shave care compositions and composition for coating, or incorporation into, razors or other shaving devices; and compositions for coating, or incorporation into, wet or dry bath tissue, facial tissue, disposable handkerchiefs, disposable towels and/or wipes, incontinence pads, panty liners, sanitary napkins, and tampons and tampon applicators; and combinations thereof; preferably a detergent composition.

[0047] As used herein, the term “detergent composition” refers to a composition or formulation designed for cleaning soiled surfaces. Such compositions include but are not limited to, dishwashing compositions, laundry detergent compositions, fabric softening compositions, fabric enhancing compositions, fabric freshening compositions, laundry pre-wash, laundry pretreat, laundry additives, spray products, dry cleaning agent or composition, laundry rinse additive, wash additive, post-rinse fabric treatment, ironing aid, hard surface cleaning compositions, unit dose formulation, delayed delivery formulation, detergent contained on or in a porous substrate or nonwoven sheet, and other suitable forms that may be apparent to one skilled in the art in view of the teachings herein. Such compositions may be used as a pre-cleaning treatment, a post-cleaning treatment, or may be added during the rinse or wash cycle of the cleaning process. The detergent compositions may have a form selected from liquid, powder, single-phase or multi-phase unit dose or pouch form, tablet, gel, paste, bar, fiber, foam, or flake. Preferably the composition is for manual-washing. Preferably, the detergent composition of the present invention is a dishwashing detergent. Preferably the composition is in the form of a liquid.

[0048] As used herein the term “improved suds longevity” means an increase in the duration of visible suds in a washing process cleaning soiled articles using the composition comprising enzymes of use in the compositions of the present invention, compared with the suds longevity provided by the same composition and process in the absence of the enzyme.

[0049] As used herein, the term “soiled surfaces” refers non-specifically to any type of flexible material consisting of a network of natural or artificial fibers, including natural, artificial, and synthetic fibers, such as, but not limited to, cotton, linen, wool, polyester, nylon, silk, acrylic, and the like, as well as various blends and combinations. Soiled surfaces may further refer to any type of hard surface, including natural, artificial, or synthetic surfaces, such as, but not limited to, tile, ceramic, granite, grout, glass, composite, vinyl, hardwood, metal, cooking surfaces, plastic, and the like, as well as blends and combinations, as well as dishware. Key targeted soiled surfaces by this application are soiled dishware.

[0050] As used herein, the term “water hardness” or “hardness” means uncomplexed cation ions (i.e., Ca²⁺ or Mg²⁺) present in water that have the potential to precipitate with anionic surfactants or any other anionically charged detergent actives under alkaline conditions, and thereby diminishing the surfactancy and cleaning capacity of surfactants. Further, the terms “high water hardness” and “elevated water hardness” can be used interchangeably and are relative terms for the purposes of the present invention, and are intended to include, but not limited to, a hardness level containing at least 12 grams of calcium ion per gallon water (gpg, “American grain hardness” units).

[0051] Fatty Acid Alpha-Dioxygenases

[0052] Fatty acids can be oxidized in the presence of molecular oxygen (O₂) by fatty acid alpha-dioxygenases (αDOX), which convert saturated and unsaturated fatty acids to their corresponding 2-hydroperoxy fatty acids via stereoselective oxygenation at the alpha carbon. The resulting 2-hydroperoxy fatty acids can undergo spontaneous decarboxylation to shorter aldehydes or can be reduced to 2-hydroxy fatty acids in the presence of a reducing agent. αDOX are generally encoded by different species of plants and fungi, where they are up-regulated during the host defense response against pathogen attack, but homologs are also found in bacteria. Alpha-dioxygenases are grouped under the InterPRO family IPRO34815 and members of such family are included as part of the current invention.

[0053] Crystal structures of Oryza sativa αDOX (SEQ ID NO: 1; PDB ID: 4KVJ, 4KVK, and 4KVL) and Arabidopsis thaliana αDOX (SEQ ID NO: 3; PDB ID: 4HHR, and 4HHS) have been published, revealing the substrate binding site and the active site residues. These structures, together with sequence alignments, suggest that several amino acids may contribute to and/or define the active site of the enzyme. For instance, in SEQ ID NO: 1, the residues H311, Y379, H382 and R559, which are highly conserved in the family, are important for catalysis. Residues N145, (H/R)157, W213, D214, 5216, Y219, G220, R230, G256, G264, H276, N277, A308, K309, H311, W315, F375, Y379, R380, H382, 5435, G437, N448, Y520, G532, F549, F552, R559, and G579 are also highly conserved, but their roles in catalysis have not been well established.

[0054] In embodiments of the present invention, the fatty acid alpha-dioxygenase comprises a polypeptide sequence comprising the amino acids H311, Y379, H382 and R559, wherein said positions are numbered with reference to SEQ ID NO: 1. In embodiments of the present invention, the fatty acid alpha-dioxygenase comprises a polypeptide sequence comprising the amino acids N145, (H/R)157, W213, D214, 5216, Y219, G220, R230, G256, G264, H276, N277, A308, K309, H311, W315, F375, Y379, R380, H382, S435, G437, N448, Y520, G532, F549, F552, R559, and G579, wherein said positions are numbered with reference to SEQ ID NO: 1.

[0055] In embodiments, the fatty acid alpha-dioxygenase comprises a polypeptide sequence comprising one or more sequence motifs selected from the group consisting of: FGRN, N-(X)₂-T-X-WWD-X-S, WD-X-S-(X)₂-YG, F-(X)₂-EHN-(X)₂-CD, ANW-X-G, AK-X-H, YR-X-H, PYS-X-TE-X-F-(X)₂-VYR-X-H-X-L, R-X-RER-X-V-X-RYN-X-FRR, MA-X-RRL-(X)₂-DRF, and combinations thereof; wherein X represents any amino acid. In embodiments, the fatty acid alpha-dioxygenase comprises a polypeptide sequence comprising the sequence motifs: FGRN, N-(X)₂-T-X-WWD-X-S, WD-X-S-(X)₂-YG, F-(X)₂-EHN-(X)₂-CD, ANW-X-G, AK-X-H, YR-X-H, PYS-X-TE-X-F-(X)₂-VYR-X-H-X-L, R-X-RER-X-V-X-RYN-X-FRR, and MA-X-RRL-(X)₂-DRF; wherein X represents any amino acid.

[0056] Not wishing to be bound by theory, in several alpha-dioxygenases, the pro-R hydrogen covalently bound to carbon 2 of a fatty acid is removed utilizing a tyrosyl radical, followed by addition of molecular oxygen to generate a 2-hydroperoxy fatty acid. In Oryza sativa αDOX (SEQ ID NO 1), such tyrosyl radical is generated from Tyr379. Alternatively, a cysteine thiyl radical could catalyze such reaction. In embodiments of the present invention, the fatty acid alpha-dioxygenase comprises a polypeptide sequence comprising a tyrosine or a cysteine at position 379, wherein said position is numbered with reference to SEQ ID NO: 1. A suitable example of an alpha-dioxygenase comprising a cysteine at position 379 is SEQ ID NO 140; wherein said position is numbered with reference to SEQ ID NO: 1.

[0057] In embodiments of the present invention, the cleaning composition comprises fatty acid alpha-dioxygenases. Preferred alpha-dioxygenases exhibit at least 20%, preferably at least 30%, preferably at least 40%, preferably at least 50%, preferably at least 60%, preferably at least 70%, preferably at least 80%, preferably at least 90%, preferably at least 95%, preferably at least 98% or preferably even 100% identity as calculated over the entire length of a sequence aligned against the entire length of at least one reference sequence selected from the group consisting of wild-type alpha-dioxygenases selected from the group consisting of: SEQ ID NO: 1, 2, 3, 4, 5, 6, 7, and their functional fragments thereof.

[0058] Preferably the fatty acid alpha-dioxygenases are present in an amount of from 0.0001 wt % to 1 wt %, by weight of the composition, based on active protein in the composition. More preferably the fatty acid alpha-dioxygenases are present in the amounts of from 0.001 wt % to 0.2 wt %, by weight of the composition, based on active protein in the composition.

[0059] In embodiments of the present invention, the fatty acids being converted by the fatty acid alpha-dioxygenases are selected from the group consisting of: mono unsaturated fatty acids, di unsaturated fatty acids, tri unsaturated fatty acids, tetra unsaturated fatty acids, penta unsaturated fatty acids, hexa unsaturated fatty acids, saturated fatty acids, and mixtures thereof; preferably myristoleic acid, myristic acid, pentadecanoic acid, palmitoleic acid, palmitic acid, sapienic acid, margaric acid, oleic acid, elaidic acid, vaccenic acid, linoleic acid, linoelaidic acid, α-linolenic acid, γ-linolenic acid, stearic acid, gadoleic acid, arachidic acid, behenic acid, α-eleostearic acid, β-eleostearic acid, ricinoleic acid, eicosenic acid, arachidonic acid, eicosapentaenoic acid, erucic acid, docosadienoic acid, docosahexaenoic acid, tetracosenoic acid, and mixtures thereof, preferably palmitic acid, stearic acid, oleic acid, and linoleic acid, and mixtures thereof.

[0060] In embodiments, the cleaning composition comprises a fatty acid alpha-dioxygenase; having at least about 50%, at least about 60%, at least about 70%, at least about 80% identity to one or more sequences selected from the group consisting of: SEQ ID NO: 1, 2, 3, 4, 5, 6, 7, and their functional fragments thereof; preferably SEQ ID NO: 1, 2, and their functional fragments; and most preferably SEQ ID NO: 1, and its functional fragments. Suitable examples of fatty acid alpha-dioxygenases with at least about 50% identity to SEQ ID NO: 1 is SEQ ID NO: 45. Suitable examples of fatty acid alpha-dioxygenases with at least about 60% identity to SEQ ID NO: 1 are SEQ ID NO: 24, 26, 27, and 43. Suitable examples of fatty acid alpha-dioxygenases with at least about 80% identity to SEQ ID NO: 1 are SEQ ID NO: 15, 16, 17, 18, 19, 20, 21, 22, 23, 25, 28, 29, 30, 31, 32, 33, 34, 35, 36, 37, 38, 39, 40, 41, 42, 44, 46, 47, 48, 49, 50, 51, 52, 53, 54, 55, 56, 57, and 58. Suitable examples of fatty acid alpha-dioxygenases with at least about 60% identity to SEQ ID NO: 2 are SEQ ID NO: 60, 61, and 68. Suitable examples of fatty acid alpha-dioxygenases with at least about 70% identity to SEQ ID NO: 2 are SEQ ID NO: 59, 62, 63, 64, 65, 66, 67, 69, and 70.

[0061] In embodiments, the cleaning composition comprises a fatty acid alpha-dioxygenase; wherein said alpha-dioxygenase comprises a polypeptide sequence having at least about 90%, 95%, 98%, 100% identity to one or more sequences selected from the group consisting of: SEQ ID NO: 1, 2, 3, 4, 5, 6, 7, 15, 16, 17, 18, 19, 20, 21, 22, 23, 24, 25, 26, 27, 28, 29, 30, 31, 32, 33, 34, 35, 36, 37, 38, 39, 40, 41, 42, 43, 44, 45, 46, 47, 48, 49, 50, 51, 52, 53, 54, 55, 56, 57, 58, 59, 60, 61, 62, 63, 64, 65, 66, 67, 68, 69, 70, 71, 72, 73, 74, 75, 76, 77, 78, 79, 80, 81, 82, 83, 84, 85, 86, 87, 88, 89, 90, 91, 92, 93, 94, 95, 96, 97, 98, 99, 100, 101, 102, 103, 104, 105, 106, 107, 108, 109, 110, 111, 112, 113, 114, 115, 116, 117, 118, 119, 120, 121, 122, 123, 124, 125, 126, 127, 128, 129, 130, 131, 132, 133, 134, 135, 136, 137, 138, 139, 140, 141, 142, 143, 144, 145, 146, 147, 148, 149, 150, 151, 152, 153, 154, 155, 156, 157, 158, 159, 160, 161, 162, 163, 164, 165, 166, 167, 168, 169, 170, 171, 172, 173, 174, 175, 176, 177, 178, 179, 180, 181, 182, 183, 184, 185, 186, 187, 188, 189, 190, 191, 192, 193, 194, 195, 196, 197, 198, 199, 200, 201, 202, 203, 204, 205, 206, 207, 208, 209, 210, 211, 212, 213, 214, 215, 216, 217, 218, 219, 220, 221, 222, 223, 224, 225, 226, 227, 228, 229, 230, 231, 232, 233, 234, 235, 236, 237, 238, 239, 240, 241, 242, 243, 244, 245, 246, 247, and their functional fragments thereof; preferably SEQ ID NO: 1, 2, 15, 16, 17, 18, 19, 20, 21, 22, 23, 24, 25, 26, 27, 28, 29, 30, 31, 32, 33, 34, 35, 36, 37, 38, 39, 40, 41, 42, 43, 44, 45, 46, 47, 48, 49, 50, 51, 52, 53, 54, 55, 56, 57, 58, 59, 60, 61, 62, 63, 64, 65, 66, 67, 68, 69, 70, and their functional fragments thereof; more preferably SEQ ID NO: 1, 15, 16, 17, 18, 19, 20, 21, 22, 23, 24, 25, 26, 27, 28, 29, 30, 31, 32, 33, 34, 35, 36, 37, 38, 39, 40, 41, 42, 43, 44, 45, 46, 47, 48, 49, 50, 51, 52, 53, 54, 55, 56, 57, 58; most preferably SEQ ID NO: 1.

[0062] Identity, or homology, percentages as mentioned herein in respect of the present invention are those that can be calculated, for example, with AlignX obtainable from Thermo Fischer Scientific or with the alignment tool from Uniprot (https://www.uniprot.org/align/). Alternatively, a manual alignment can be performed. For enzyme sequence comparison the following settings can be used: Alignment algorithm: Needleman and Wunsch, J. Mol. Biol. 1970, 48: 443-453. As a comparison matrix for amino acid similarity the Blosum62 matrix is used (Henikoff S. and Henikoff J. G., P.N.A.S. USA 1992, 89: 10915-10919). The following gap scoring parameters are used: Gap opening penalty: −10, gap extension penalty: −1.

[0063] A given sequence is typically compared against the full-length sequence or fragments of SEQ ID NO: 1, 2, 3, 4, 5, 6, 7, 15, 16, 17, 18, 19, 20, 21, 22, 23, 24, 25, 26, 27, 28, 29, 30, 31, 32, 33, 34, 35, 36, 37, 38, 39, 40, 41, 42, 43, 44, 45, 46, 47, 48, 49, 50, 51, 52, 53, 54, 55, 56, 57, 58, 59, 60, 61, 62, 63, 64, 65, 66, 67, 68, 69, 70, 71, 72, 73, 74, 75, 76, 77, 78, 79, 80, 81, 82, 83, 84, 85, 86, 87, 88, 89, 90, 91, 92, 93, 94, 95, 96, 97, 98, 99, 100, 101, 102, 103, 104, 105, 106, 107, 108, 109, 110, 111, 112, 113, 114, 115, 116, 117, 118, 119, 120, 121, 122, 123, 124, 125, 126, 127, 128, 129, 130, 131, 132, 133, 134, 135, 136, 137, 138, 139, 140, 141, 142, 143, 144, 145, 146, 147, 148, 149, 150, 151, 152, 153, 154, 155, 156, 157, 158, 159, 160, 161, 162, 163, 164, 165, 166, 167, 168, 169, 170, 171, 172, 173, 174, 175, 176, 177, 178, 179, 180, 181, 182, 183, 184, 185, 186, 187, 188, 189, 190, 191, 192, 193, 194, 195, 196, 197, 198, 199, 200, 201, 202, 203, 204, 205, 206, 207, 208, 209, 210, 211, 212, 213, 214, 215, 216, 217, 218, 219, 220, 221, 222, 223, 224, 225, 226, 227, 228, 229, 230, 231, 232, 233, 234, 235, 236, 237, 238, 239, 240, 241, 242, 243, 244, 245, 246, or 247 to obtain a score. In embodiments, polypeptides of the present disclosure include polypeptides containing an amino acid sequence having at least about 10%, at least about 15%, at least about 20%, at least about 25%, at least about 30%, at least about 35%, at least about 40%, at least about 45%, at least about 50%, at least about 55%, at least about 60%, at least about 65%, at least about 70%, at least about 75%, at least about 80%, at least about 85%, at least about 90%, at least about 95%, at least about 98%, at least about 99%, or 100% identity to the amino acid sequence of any one of SEQ ID NO: 1, 2, 3, 4, 5, 6, 7, 15, 16, 17, 18, 19, 20, 21, 22, 23, 24, 25, 26, 27, 28, 29, 30, 31, 32, 33, 34, 35, 36, 37, 38, 39, 40, 41, 42, 43, 44, 45, 46, 47, 48, 49, 50, 51, 52, 53, 54, 55, 56, 57, 58, 59, 60, 61, 62, 63, 64, 65, 66, 67, 68, 69, 70, 71, 72, 73, 74, 75, 76, 77, 78, 79, 80, 81, 82, 83, 84, 85, 86, 87, 88, 89, 90, 91, 92, 93, 94, 95, 96, 97, 98, 99, 100, 101, 102, 103, 104, 105, 106, 107, 108, 109, 110, 111, 112, 113, 114, 115, 116, 117, 118, 119, 120, 121, 122, 123, 124, 125, 126, 127, 128, 129, 130, 131, 132, 133, 134, 135, 136, 137, 138, 139, 140, 141, 142, 143, 144, 145, 146, 147, 148, 149, 150, 151, 152, 153, 154, 155, 156, 157, 158, 159, 160, 161, 162, 163, 164, 165, 166, 167, 168, 169, 170, 171, 172, 173, 174, 175, 176, 177, 178, 179, 180, 181, 182, 183, 184, 185, 186, 187, 188, 189, 190, 191, 192, 193, 194, 195, 196, 197, 198, 199, 200, 201, 202, 203, 204, 205, 206, 207, 208, 209, 210, 211, 212, 213, 214, 215, 216, 217, 218, 219, 220, 221, 222, 223, 224, 225, 226, 227, 228, 229, 230, 231, 232, 233, 234, 235, 236, 237, 238, 239, 240, 241, 242, 243, 244, 245, 246, and 247. Polypeptides of the disclosure also include polypeptides having at least about 10, at least about 12, at least about 14, at least about 16, at least about 18, at least about 20, at least about 30, at least about 40, at least about 50, at least about 60, at least about 70, or at least about 80 consecutive amino acids of the amino acid sequence of any one of SEQ ID NO: 1, 2, 3, 4, 5, 6, 7, 15, 16, 17, 18, 19, 20, 21, 22, 23, 24, 25, 26, 27, 28, 29, 30, 31, 32, 33, 34, 35, 36, 37, 38, 39, 40, 41, 42, 43, 44, 45, 46, 47, 48, 49, 50, 51, 52, 53, 54, 55, 56, 57, 58, 59, 60, 61, 62, 63, 64, 65, 66, 67, 68, 69, 70, 71, 72, 73, 74, 75, 76, 77, 78, 79, 80, 81, 82, 83, 84, 85, 86, 87, 88, 89, 90, 91, 92, 93, 94, 95, 96, 97, 98, 99, 100, 101, 102, 103, 104, 105, 106, 107, 108, 109, 110, 111, 112, 113, 114, 115, 116, 117, 118, 119, 120, 121, 122, 123, 124, 125, 126, 127, 128, 129, 130, 131, 132, 133, 134, 135, 136, 137, 138, 139, 140, 141, 142, 143, 144, 145, 146, 147, 148, 149, 150, 151, 152, 153, 154, 155, 156, 157, 158, 159, 160, 161, 162, 163, 164, 165, 166, 167, 168, 169, 170, 171, 172, 173, 174, 175, 176, 177, 178, 179, 180, 181, 182, 183, 184, 185, 186, 187, 188, 189, 190, 191, 192, 193, 194, 195, 196, 197, 198, 199, 200, 201, 202, 203, 204, 205, 206, 207, 208, 209, 210, 211, 212, 213, 214, 215, 216, 217, 218, 219, 220, 221, 222, 223, 224, 225, 226, 227, 228, 229, 230, 231, 232, 233, 234, 235, 236, 237, 238, 239, 240, 241, 242, 243, 244, 245, 246, and 247.

[0064] The present invention also includes variants of fatty acid alpha-dioxygenases, as previously described. Variants of fatty acid alpha-dioxygenases include polypeptide sequences resulting from modification of a wild-type fatty acid alpha-dioxygenase at one or more amino acids. A variant includes a “modified enzyme” or a “mutant enzyme” which encompasses proteins having at least one substitution, insertion, and/or deletion of an amino acid. A modified enzyme may have 1, 2, 3, 4, 5, 6, 7, 8, 9 or 10 or more amino acid modifications (selected from substitutions, insertions, deletions and combinations thereof).

[0065] The variants may have “conservative” substitutions. Suitable examples of conservative substitution includes one conservative substitution in the enzyme, such as a conservative substitution in SEQ ID NO: 1, 2, 3, 4, 5, 6, 7, 15, 16, 17, 18, 19, 20, 21, 22, 23, 24, 25, 26, 27, 28, 29, 30, 31, 32, 33, 34, 35, 36, 37, 38, 39, 40, 41, 42, 43, 44, 45, 46, 47, 48, 49, 50, 51, 52, 53, 54, 55, 56, 57, 58, 59, 60, 61, 62, 63, 64, 65, 66, 67, 68, 69, 70, 71, 72, 73, 74, 75, 76, 77, 78, 79, 80, 81, 82, 83, 84, 85, 86, 87, 88, 89, 90, 91, 92, 93, 94, 95, 96, 97, 98, 99, 100, 101, 102, 103, 104, 105, 106, 107, 108, 109, 110, 111, 112, 113, 114, 115, 116, 117, 118, 119, 120, 121, 122, 123, 124, 125, 126, 127, 128, 129, 130, 131, 132, 133, 134, 135, 136, 137, 138, 139, 140, 141, 142, 143, 144, 145, 146, 147, 148, 149, 150, 151, 152, 153, 154, 155, 156, 157, 158, 159, 160, 161, 162, 163, 164, 165, 166, 167, 168, 169, 170, 171, 172, 173, 174, 175, 176, 177, 178, 179, 180, 181, 182, 183, 184, 185, 186, 187, 188, 189, 190, 191, 192, 193, 194, 195, 196, 197, 198, 199, 200, 201, 202, 203, 204, 205, 206, 207, 208, 209, 210, 211, 212, 213, 214, 215, 216, 217, 218, 219, 220, 221, 222, 223, 224, 225, 226, 227, 228, 229, 230, 231, 232, 233, 234, 235, 236, 237, 238, 239, 240, 241, 242, 243, 244, 245, 246, 247, and their functional fragments thereof. Other suitable examples include 10 or fewer conservative substitutions in the protein, such as five or fewer. An enzyme of the invention may therefore include 1, 2, 3, 4, 5, 6, 7, 8, 9, 10 or more conservative substitutions. An enzyme can be produced to contain one or more conservative substitutions by manipulating the nucleotide sequence that encodes that enzyme using, for example, standard procedures such as site-directed mutagenesis or PCR. Examples of amino acids which may be substituted for an original amino acid in an enzyme and which are regarded as conservative substitutions include: Ser for Ala; Lys for Arg; Gln or His for Asn; Glu for Asp; Asn for Gln; Asp for Glu; Pro for Gly; Asn or Gln for His; Leu or Val for Ile; Ile or Val for Leu; Arg or Gln for Lys; Leu or Ile for Met; Met, Leu or Tyr for Phe; Thr for Ser; Ser for Thr; Tyr for Trp; Trp or Phe for Tyr; and Ile or Leu for Val.

[0066] It is important that variants of enzymes retain and preferably improve the ability of the wild-type protein to catalyze the conversion of the fatty acids. Some performance drop in a given property of variants may of course be tolerated, but the variants should retain and preferably improve suitable properties for the relevant application for which they are intended. Screening of variants of one of the wild-types can be used to identify whether they retain and preferably improve appropriate properties.

[0067] The alpha-dioxygenase polypeptides described herein are not restricted to the genetically encoded amino acids. Thus, in addition to the genetically encoded amino acids, the polypeptides described herein may be comprised, either in whole or in part, of naturally-occurring and/or synthetic non-encoded amino acids. Certain commonly encountered non-encoded amino acids of which the polypeptides described herein may be comprised include, but are not limited to: the D-stereoisomers of the genetically-encoded amino acids; 2,3-diaminopropionic acid (Dpr); α-aminoisobutyric acid (Aib); ε-aminohexanoic acid (Aha); 6-aminovaleric acid (Ava); N-methylglycine or sarcosine (MeGly or Sar); ornithine (Orn); citrulline (Cit); t-butylalanine (Bua); t-butylglycine (Bug); N-methylisoleucine (Melle); phenylglycine (Phg); cyclohexylalanine (Cha); norleucine (Nle); naphthylalanine (Nal); 2-chlorophenylalanine (Oct); 3-chlorophenylalanine (Mcf); 4-chlorophenylalanine (Pcf); 2-fluorophenylalanine (Off); 3-fluorophenylalanine (Mff); 4-fluorophenylalanine (Pff); 2-bromophenylalanine (Obf); 3-bromophenylalanine (Mbf); 4-bromophenylalanine (Pbf); 2-methylphenylalanine (Omf); 3-methylphenylalanine (Mmf); 4-methylphenylalanine (Pmf); 2-nitrophenylalanine (Ont); 3-nitrophenylalanine (Mnf); 4-nitrophenylalanine (Pnf); 2-cyanophenylalanine (Oct); 3-cyanophenylalanine (Mcf); 4-cyanophenylalanine (Pcf); 2-trifluoromethylphenylalanine (Ott); 3-trifluoromethylphenylalanine (Mtf); 4-trifluoromethylphenylalanine (Ptf); 4-aminophenylalanine (Paf); 4-iodophenylalanine (Pit); 4-aminomethylphenylalanine (Pamf); 2,4-dichlorophenylalanine (Opcf); 3,4-dichlorophenylalanine (Mpcf); 2,4-difluorophenylalanine (Opff); 3,4-difluorophenylalanine (Mpff); pyrid-2-ylalanine (2pAla); pyrid-3-ylalanine (3pAla); pyrid-4-ylalanine (4pAla); naphth-1-ylalanine (1nAla); naphth-2-ylalanine (2nAla); thiazolylalanine (taAl a); benzothienylalanine (bAla); thienylalanine (tAla); furylalanine (fAla); homophenylalanine (hPhe); homotyrosine (hTyr); homotryptophan (hTrp); pentafluorophenylalanine (5ff); styrylkalanine (sAla); authrylalanine (aAla); 3,3-diphenylalanine (Dfa); 3-amino-5-phenylpentanoic acid (Afp); penicillamine (Pen); 1,2,3,4-tetrahydroisoquinoline-3-carboxylic acid (Tic); β-2-thienylalanine (Thi); methionine sulfoxide (Mso); N(w)-nitroarginine (nArg); homolysine (hLys); phosphonomethylphenylalanine (pmPhe); phosphoserine (pSer); phosphothreonine (pThr); homoaspartic acid (hAsp); homoglutamic acid (hGlu); 1-aminocyclopent-(2 or 3)-ene-4 carboxylic acid; pipecolic acid (PA), azetidine-3-carboxylic acid (ACA); 1-aminocyclopentane-3-carboxylic acid; allylglycine (aOly); propargylglycine (pgGly); homoalanine (hAla); norvaline (nVal); homoleucine (hLeu), homovaline (hVal); homoisoleucine (hIle); homoarginine (hArg); N-acetyl lysine (AcLys); 2,4-diaminobutyric acid (Dbu); 2,3-diaminobutyric acid (Dab); N-methylvaline (MeVal); homocysteine (hCys); homoserine (hSer); hydroxyproline (Hyp) and homoproline (hPro). Additional non-encoded amino acids of which the polypeptides described herein may be comprised will be apparent to those of skill in the art. These amino acids may be in either the L- or D-configuration.

[0068] The invention also includes variants in the form of truncated forms or fragments derived from a wild-type enzyme, such as a protein with a truncated N-terminus or a truncated C-terminus. In embodiments, the present invention also provides variants of alpha-dioxygenase enzymes that comprise a fragment of any of the alpha-dioxygenase polypeptides described herein that retain the functional alpha-dioxygenase activity and/or an improved property of an engineered alpha-dioxygenase polypeptide. Accordingly, in embodiments, the present invention provides a polypeptide fragment having alpha-dioxygenase activity (e.g., capable of converting substrate to product under suitable reaction conditions), wherein the fragment comprises at least about 80%, 90%, 95%, 98%, or 99% of a full-length amino acid sequence of an engineered polypeptide of the present invention. Some enzymes may include an N-terminal signal peptide that is likely removed upon secretion by the cell. The present invention includes variants without the N-terminal signal peptide. Bioinformatic tools, such as SignalP ver 4.1 (Petersen T N., Brunak S., von Heijne G. and Nielsen H. (2011), Nature Methods, 8:785-786), can be used to predict the existence and length of such signal peptides.

[0069] In embodiments, the present invention provides an alpha-dioxygenase enzyme having an amino acid sequence comprising an insertion as compared to any one of the alpha-dioxygenase polypeptide sequences described herein. Thus, for each and every embodiment of the alpha-dioxygenase polypeptides of the invention, the insertions can comprise one or more amino acids, 2 or more amino acids, 3 or more amino acids, 4 or more amino acids, 5 or more amino acids, 6 or more amino acids, 8 or more amino acids, 10 or more amino acids, 15 or more amino acids, or 20 or more amino acids, where the associated functional activity and/or improved properties of the alpha-dioxygenase described herein is maintained. The insertions can be to amino or carboxy terminus, or internal portions of the alpha-dioxygenase polypeptide. The invention also includes variants derived by adding an extra amino acid sequence, such as an N-terminal tag or a C-terminal tag. Non-limiting examples of tags are maltose binding protein (MBP) tag, glutathione S-transferase (GST) tag, thioredoxin (Trx) tag, His-tag, and any other tags known by those skilled in art. Tags can be used to improve solubility and expression levels during fermentation or as a handle for enzyme purification.

[0070] Enzymes can also be modified by a variety of chemical techniques to produce derivatives having essentially the same or preferably improved activity as the unmodified enzymes, and optionally having other desirable properties. For example, carboxylic acid groups of the protein, whether carboxyl-terminal or side chain, may be provided in the form of a salt of a pharmaceutically-acceptable cation or esterified, for example to form a C1-C6 alkyl ester, or converted to an amide, for example of formula CONR1R2 wherein R1 and R2 are each independently H or C1-C6 alkyl, or combined to form a heterocyclic ring, such as a 5- or 6-membered ring. Amino groups of the enzyme, whether amino-terminal or side chain, may be in the form of a pharmaceutically-acceptable acid addition salt, such as the HCl, HBr, acetic acid, benzoic acid, toluene sulfonic acid, maleic acid, tartaric acid and other organic acid addition salts, or may be modified to C1-C20 alkyl or dialkyl amino or further converted to an amide. Hydroxyl groups of the protein side chains may be converted to alkoxy or ester groups, for example C1-C20 alkoxy or C1-C20 alkyl ester, using well-recognized techniques. Phenyl and phenolic rings of the protein side chains may be substituted with one or more halogen atoms, such as F, C1, Br or I, or with C1-C20 alkyl, C1-C20 alkoxy, carboxylic acids and esters thereof, or amides of such carboxylic acids. Methylene groups of the protein side chains can be extended to homologous C2-C4 alkylenes. Thiols can be protected with any one of a number of well-recognized protecting groups, such as acetamide groups. Those skilled in the art will also recognize methods for introducing cyclic structures into the proteins of this disclosure to select and provide conformational constraints to the structure that result in enhanced stability.

[0071] In embodiments, the enzymes can be provided on a solid support, such as a membrane, resin, solid carrier, or other solid phase material. A solid support can be composed of organic polymers such as polystyrene, polyethylene, polypropylene, polyfluoroethylene, polyethyleneoxy, and polyacrylamide, as well as co-polymers and grafts thereof. A solid support can also be inorganic, such as glass, silica, controlled pore glass (CPG), reverse phase silica or metal, such as gold or platinum. The configuration of a solid support can be in the form of beads, spheres, particles, granules, a gel, a membrane or a surface. Surfaces can be planar, substantially planar, or non-planar. Solid supports can be porous or non-porous, and can have swelling or non-swelling characteristics. A solid support can be configured in the form of a well, depression, or other container, vessel, feature, or location.

[0072] In embodiments, the polypeptides having alpha-dioxygenase activity are bound or immobilized on the solid support such that they retain at least a portion of their improved properties relative to a reference polypeptide (e.g., SEQ ID NO: 1). Accordingly, it is further contemplated that any of the methods of using the alpha-dioxygenase polypeptides of the present invention can be carried out using the same alpha-dioxygenase polypeptides bound or immobilized on a solid support.

[0073] The alpha-dioxygenase polypeptide can be bound non-covalently or covalently. Various methods for conjugation and immobilization of enzymes to solid supports (e.g., resins, membranes, beads, glass, etc.) are well known in the art. Other methods for conjugation and immobilization of enzymes to solid supports (e.g., resins, membranes, beads, glass, etc.) are well known in the art (See, e.g., Yi et al., Proc. Biochem., 42: 895-898 [2007]; Martin et al., Appl. Microbiol. Biotechnol., 76: 843-851 [2007]; Koszelewski et al. J. Mol. Cat. B: Enz., 63: 39-44 [2010]; Truppo et al., Org. Proc. Res. Develop., published online: dx.doi.org/10.1021/op200157c; and Mateo et al., Biotechnol. Frog., 18:629-34 [2002], etc.). Solid supports useful for immobilizing the alpha-dioxygenase polypeptides of the present invention include, but are not limited to, beads or resins comprising polymethacrylate with epoxide functional groups, polymethacrylate with amino epoxide functional groups, styrene/DVB copolymer or polymethacrylate with octadecyl functional groups.

[0074] The enzymes may be incorporated into the cleaning compositions via an additive particle, such as an enzyme granule or in the form of an encapsulate or may be added in the form of a liquid formulation. Encapsulating the enzymes promote the stability of the enzymes in the composition and helps to counteract the effect of any hostile compounds present in the composition, such as bleach, protease, surfactant, chelant, etc. The fatty acid alpha-dioxygenase enzymes may be the only enzymes in the additive particle or may be present in the additive particle in combination with one or more additional co-enzymes.

[0075] In embodiments, the cleaning composition comprises a fatty acid alpha-dioxygenase, wherein said fatty acid alpha-dioxygenase is present in an amount of from 0.0001 wt % to 1 wt %, preferably from 0.001 wt % to 0.2 wt %, by weight of the cleaning composition, based on active protein.

[0076] In embodiments, the consumer product further comprises one or more co-enzymes selected from the group consisting of: fatty-acid peroxidases (EC 1.11.1.3), unspecific peroxygenases (EC 1.11.2.1), plant seed peroxygenases (EC 1.11.2.3), fatty acid peroxygenases (EC1.11.2.4), linoleate diol synthases (EC 1.13.11.44), 5,8-linoleate diol synthases (EC 1.13.11.60 and EC 5.4.4.5), 7,8-linoleate diol synthases (EC 1.13.11.60 and EC 5.4.4.6), 9,14-linoleate diol synthases (EC 1.13.11.B1), 8,11-linoleate diol synthases, oleate diol synthases, other linoleate diol synthases, unspecific monooxygenase (EC 1.14.14.1), alkane 1-monooxygenase (EC 1.14.15.3), oleate 12-hydroxylases (EC 1.14.18.4), fatty acid amide hydrolases (EC 3.5.1.99), fatty acid photoalpha-dioxygenases (EC 4.1.1.106), oleate hydratases (EC 4.2.1.53), linoleate isomerases (EC 5.2.1.5), linoleate (10E,12Z)-isomerases (EC 5.3.3.B2), P450 fatty acid decarboxylases (OleT-like), non-heme fatty acid decarboxylases (UndA-like), amylases, lipases, proteases, cellulases, and mixtures thereof; preferably fatty-acid peroxidases (EC 1.11.1.3), unspecific peroxygenases (EC 1.11.2.1), plant seed peroxygenases (EC 1.11.2.3), and fatty acid peroxygenases (EC1.11.2.4), non-heme fatty acid decarboxylases (UndA-like), fatty acid decarboxylases (OleT-like), and mixtures thereof.

[0077] Where necessary, the composition comprises, provides access to, or forms in situ any additional substrate necessary for the effective functioning of the enzyme. For example, molecular oxygen can be provided as an additional substrate for fatty acid alpha-dioxygenases. Molecular oxygen can be obtained from the atmosphere or from a precursor that can be transformed to produce oxygen in situ. In many applications, oxygen from the atmosphere can be present in sufficient amounts. In embodiments, the cleaning composition may be supplemented with heme and/or a source of iron to enhance or facilitate the conversion of the fatty acids.

[0078] In embodiments, the fatty acid alpha-dioxygenase comprises a heme cofactor selected from the group comprising: heme a, heme b, heme c, heme d, heme i, heme m, heme o, heme s, their derivatives, and mixtures thereof; preferably heme b. In other embodiments, the heme cofactor is covalently attached to the fatty acid alpha-dioxygenases.

[0079] In some embodiments, the fatty acid alpha-dioxygenase comprises a heme cofactor comprising: a) a porphyrin group and b) a metal. Non-limiting examples of porphyrin groups are: protoporphyrin IX, N-methyl protoporphyrin IX, protoporphyrin IX monomethyl ester, protoporphyrin IX dimethyl ester, protoporphyrin IX diamide, protoporphyrin IX bis thiosulfate, porphin, phthalocyanine, octaethylporphoyrin, tetraphenylporphyrin, and their derivatives; preferably protoporphyrin IX. Non-limiting examples of metals are: Mg, Al, V, Cr, Mn, Fe, Co, Ni, Cu, Zn, Ga, Ge, Mo, Tc, Ru, Rh, Pd, Ag, Cd, In, Sn, Sb, W, Re, Os, Ir, Pt, Au, Hg, Tl, Pb, Bi, and mixtures thereof; preferably Fe. In some embodiments, the fatty acid alpha-dioxygenase comprises a heme cofactor comprising a cation selected from the group consisting of: Mg²⁺, Cr³⁺, Mn³⁺, Fe³⁺, Co³⁺, Ni²⁺, Cu²⁺, Zn²⁺, Ga³⁺, Rh²⁺, Pd²⁺, Ag²⁺, In³⁺, Sn⁴⁺, VO²⁺, and mixtures thereof; preferably Fe³⁺. In some embodiments, the fatty acid alpha-dioxygenase comprises a heme cofactor comprising an axially bound ligand. Non-limiting examples of ligands are: chloride, methyl group, carbonyl group, hydroxide group, and tetrahydrofuran.

[0080] Polynucleotides and Plasmids

[0081] In another aspect, the present invention provides polynucleotides encoding the alpha-dioxygenase enzymes. The polynucleotides may be operatively linked to one or more heterologous regulatory sequences that control gene expression to create a recombinant polynucleotide capable of expressing the polypeptide. Expression constructs containing a heterologous polynucleotide encoding the alpha-dioxygenase can be introduced into appropriate host cells to express the corresponding alpha-dioxygenase polypeptide.

[0082] Due to the degeneracy of the genetic code, where the same amino acids are encoded by alternative or synonymous codons, a large number of nucleic acids that encode the alpha-dioxygenase enzymes disclosed herein can be produced. Those skilled in the art could make any number of different nucleic acids by simply modifying the sequence of one or more codons in a way which does not change the amino acid sequence of the protein. In this regard, the present invention specifically contemplates each and every possible variation of polynucleotides that could be made by selecting combinations based on the possible codon choices, and all such variations are to be considered specifically disclosed for any polypeptide disclosed herein. In various embodiments, the codons are preferably selected to fit the host cell in which the protein is being produced. For example, preferred codons used in bacteria are used to express the gene in bacteria; preferred codons used in yeast are used for expression in yeast; and preferred codons used in mammals are used for expression in mammalian cells.

[0083] The polynucleotides encoding the enzyme can be prepared by standard methods, such as solid-phase methods. In embodiments, fragments of up to about 100 bases can be individually synthesized, then joined (e.g., by enzymatic or chemical ligation methods or polymerase mediated methods) to form any desired continuous sequence. For example, polynucleotides and oligonucleotides of the invention can be prepared by chemical synthesis (e.g., using the classical phosphoramidite method described by Beaucage et al., Tet. Lett., 22:1859-69 [1981], or the method described by Matthes et al., EMBO J., 3:801-05 [1984], as it is typically practiced in automated synthetic methods). According to the phosphoramidite method, oligonucleotides are synthesized (e.g., in an automatic DNA synthesizer), purified, annealed, ligated and cloned in appropriate vectors.

[0084] In embodiments, the polynucleotide encodes alpha-dioxygenase polypeptide comprising an amino acid sequence selected from the group consisting of SEQ ID NO: 1, 2, 3, 4, 5, 6, 7, 15, 16, 17, 18, 19, 20, 21, 22, 23, 24, 25, 26, 27, 28, 29, 30, 31, 32, 33, 34, 35, 36, 37, 38, 39, 40, 41, 42, 43, 44, 45, 46, 47, 48, 49, 50, 51, 52, 53, 54, 55, 56, 57, 58, 59, 60, 61, 62, 63, 64, 65, 66, 67, 68, 69, 70, 71, 72, 73, 74, 75, 76, 77, 78, 79, 80, 81, 82, 83, 84, 85, 86, 87, 88, 89, 90, 91, 92, 93, 94, 95, 96, 97, 98, 99, 100, 101, 102, 103, 104, 105, 106, 107, 108, 109, 110, 111, 112, 113, 114, 115, 116, 117, 118, 119, 120, 121, 122, 123, 124, 125, 126, 127, 128, 129, 130, 131, 132, 133, 134, 135, 136, 137, 138, 139, 140, 141, 142, 143, 144, 145, 146, 147, 148, 149, 150, 151, 152, 153, 154, 155, 156, 157, 158, 159, 160, 161, 162, 163, 164, 165, 166, 167, 168, 169, 170, 171, 172, 173, 174, 175, 176, 177, 178, 179, 180, 181, 182, 183, 184, 185, 186, 187, 188, 189, 190, 191, 192, 193, 194, 195, 196, 197, 198, 199, 200, 201, 202, 203, 204, 205, 206, 207, 208, 209, 210, 211, 212, 213, 214, 215, 216, 217, 218, 219, 220, 221, 222, 223, 224, 225, 226, 227, 228, 229, 230, 231, 232, 233, 234, 235, 236, 237, 238, 239, 240, 241, 242, 243, 244, 245, 246, 247, functional fragments thereof, or variants thereof.

[0085] An isolated polynucleotide encoding an alpha-dioxygenase polypeptide may be manipulated in a variety of ways to provide for expression of the polypeptide. Manipulation of the isolated polynucleotide prior to its insertion into a vector may be desirable or necessary depending on the expression vector. The techniques for modifying polynucleotides and nucleic acid sequences utilizing recombinant DNA methods are well known in the art.

[0086] For bacterial host cells, suitable promoters for directing transcription of the nucleic acid constructs of the present invention, include the promoters obtained from the E. coli lac operon, Streptomyces coelicolor agarase gene (dagA), Bacillus subtilis levansucrase gene (sacB), Bacillus licheniformis alpha-amylase gene (amyL), Bacillus stearothermophilus maltogenic amylase gene (amyM), Bacillus amyloliquefaciens alpha-amylase gene (amyQ), Bacillus licheniformis penicillinase gene (penP), Bacillus subtilis xylA and xylB genes, and prokaryotic beta-lactamase gene (See, e.g., Villa-Kamaroff et al., Proc. Natl. Acad. Sci. USA 75: 3727-3731 [1978]), as well as the tac promoter (See, e.g., DeBoer et al., Proc. Natl Acad. Sci. USA 80: 21-25 [1983]). Additional suitable promoters are known to those in the art.

[0087] For filamentous fungal host cells, suitable promoters for directing the transcription of the nucleic acid constructs of the present invention include promoters obtained from the genes for Aspergillus oryzae TAKA amylase, Rhizomucor miehei aspartic proteinase, Aspergillus niger neutral alpha-amylase, Aspergillus niger acid stable alpha-amylase, Aspergillus niger or Aspergillus awamori glucoamylase (glaA), Rhizomucor miehei lipase, Aspergillus oryzae alkaline protease, Aspergillus oryzae triose phosphate isomerase, Aspergillus nidulans acetamidase, and Fusarium oxysporum trypsin-like protease (WO 96/00787), as well as the NA2-tpi promoter (a hybrid of the promoters from the genes for Aspergillus niger neutral alpha-amylase and Aspergillus oryzae triose phosphate isomerase), and mutant, truncated, and hybrid promoters thereof.

[0088] In a yeast host, useful promoters include, but are not limited to those from the genes for Saccharomyces cerevisiae enolase (ENO-1), Saccharomyces cerevisiae galactokinase (GAL1), Saccharomyces cerevisiae alcohol dehydrogenase/glyceraldehyde-3-phosphate dehydrogenase (ADH2/GAP), and Saccharomyces cerevisiae 3-phosphoglycerate kinase, as well as other useful promoters for yeast host cells (See, e.g., Romanos, et al., Yeast 8:423-488 [1992]).

[0089] A transcription terminator sequence, a sequence recognized by a host cell to terminate transcription, can be operably linked to the 3′ terminus of the nucleic acid sequence encoding the polypeptide. Any terminator that is functional in the host cell of choice may be used in the present invention. For example, exemplary transcription terminators for filamentous fungal host cells can be obtained from the genes for Aspergillus oryzae TAKA amylase, Aspergillus niger glucoamylase, Aspergillus nidulans anthranilate synthase, Aspergillus niger alpha-glucosidase, and Fusarium oxysporum trypsin-like protease. Exemplary terminators for yeast host cells can be obtained from the genes for Saccharomyces cerevisiae enolase, Saccharomyces cerevisiae cytochrome C (CYC1), and Saccharomyces cerevisiae glyceraldehyde-3-phosphate dehydrogenase, as well as other useful terminators for yeast host cells known in the art (See, e.g., Romanos et al., supra).

[0090] A leader sequence, a nontranslated region of an mRNA that is important for translation by the host cell, can be operably linked to the 5′ terminus of the nucleic acid sequence encoding the polypeptide. Any leader sequence that is functional in the host cell of choice may be used. Exemplary leaders for filamentous fungal host cells are obtained from the genes for Aspergillus oryzae TAKA amylase and Aspergillus nidulans triose phosphate isomerase. Suitable leaders for yeast host cells are obtained from the genes for Saccharomyces cerevisiae enolase (ENO-1), Saccharomyces cerevisiae 3-phosphoglycerate kinase, Saccharomyces cerevisiae alpha-factor, and Saccharomyces cerevisiae alcohol dehydrogenase/glyceraldehyde-3-phosphate dehydrogenase (ADH2/GAP).

[0091] Any polyadenylation sequence which is functional in the host cell of choice may be used in the present invention. A polyadenylation sequence is a sequence operably linked to the 3′ terminus of the nucleic acid sequence and which, when transcribed, is recognized by the host cell as a signal to add polyadenosine residues to transcribed mRNA. Exemplary polyadenylation sequences for filamentous fungal host cells can be from the genes for Aspergillus oryzae TAKA amylase, Aspergillus niger glucoamylase, Aspergillus nidulans anthranilate synthase, Fusarium oxysporum trypsin-like protease, and Aspergillus niger alpha-glucosidase., as well as additional useful polyadenylation sequences for yeast host cells known in the art (See, e.g., Guo et al., Mol. Cell. Biol., 15:5983-5990 [1995]).

[0092] The 5′ end of the coding sequence of the nucleic acid sequence may inherently contain a signal peptide coding region naturally linked in translation reading frame with the segment of the coding region that encodes the secreted polypeptide. A signal peptide coding region encodes for an amino acid sequence linked to the amino terminus of a polypeptide and directs the encoded polypeptide into the cell's secretory pathway. Alternatively, the 5′ end of the coding sequence may contain a signal peptide coding region that is foreign to the coding sequence. The foreign signal peptide coding region may be required where the coding sequence does not naturally contain a signal peptide coding region. Alternatively, the foreign signal peptide coding region may simply replace the natural signal peptide coding region in order to enhance secretion of the polypeptide. However, any signal peptide coding region which directs the expressed polypeptide into the secretory pathway of a host cell of choice may be used in the present invention.

[0093] Effective signal peptide coding regions for bacterial host cells are the signal peptide coding regions obtained from the genes for Bacillus NCIB 11837 maltogenic amylase, Bacillus stearothermophilus alpha-amylase, Bacillus licheniformis subtilisin, Bacillus licheniformis beta-lactamase, Bacillus stearothermophilus neutral proteases (nprT, nprS, nprM), and Bacillus subtilis prsA, as well as additional signal peptides known in the art (See, e.g., Simonen et al., Microbiol. Rev., 57: 109-137 [1993]). Effective signal peptide coding regions for filamentous fungal host cells include, but are not limited to the signal peptide coding regions obtained from the genes for Aspergillus oryzae TAKA amylase, Aspergillus niger neutral amylase, Aspergillus niger glucoamylase, Rhizomucor miehei aspartic proteinase, Humicola insolens cellulase, and Humicola lanuginosa lipase. Useful signal peptides for yeast host cells can be from the genes for Saccharomyces cerevisiae alpha-factor and Saccharomyces cerevisiae invertase, as well as additional useful signal peptide coding regions (See, e.g., Romanos et al., 1992, supra).

[0094] A propeptide coding region encodes for an amino acid sequence positioned at the amino terminus of a polypeptide. The resultant polypeptide is known as a proenzyme or propolypeptide (or a zymogen in some cases). A propolypeptide is generally inactive and can be converted to a mature active polypeptide by catalytic or autocatalytic cleavage of the propeptide from the propolypeptide. The propeptide coding region may be obtained from the genes for Bacillus subtilis alkaline protease (aprE), Bacillus subtilis neutral protease (nprT), Saccharomyces cerevisiae alpha-factor, Rhizomucor miehei aspartic proteinase, and Myceliophthora thermophila lactase (WO 95/33836).

[0095] Where both signal peptide and propeptide regions are present at the amino terminus of a polypeptide, the propeptide region is positioned next to the amino terminus of a polypeptide and the signal peptide region is positioned next to the amino terminus of the propeptide region.

[0096] It may also be desirable to add regulatory sequences, which allow the regulation of the expression of the polypeptide relative to the growth of the host cell. Examples of regulatory systems are those which cause the expression of the gene to be turned on or off in response to a chemical or physical stimulus, including the presence of a regulatory compound. In prokaryotic host cells, suitable regulatory sequences include the lac, tac, and trp operator systems. In yeast host cells, suitable regulatory systems include, as examples, the ADH2 system or GAL1 system. In filamentous fungi, suitable regulatory sequences include the TAKA alpha-amylase promoter, Aspergillus niger glucoamylase promoter, and Aspergillus oryzae gluco amylase promoter.

[0097] Other examples of regulatory sequences are those which allow for gene amplification. In eukaryotic systems, these include the dihydrofolate reductase gene, which is amplified in the presence of methotrexate, and the metallothionein genes, which are amplified with heavy metals. In these cases, the nucleic acid sequence encoding the alpha-dioxygenase polypeptide of the present invention would be operably linked with the regulatory sequence.

[0098] In embodiments, the present invention may also be directed to a recombinant expression vector comprising a polynucleotide encoding an alpha-dioxygenase polypeptide or a variant thereof, and one or more expression regulating regions such as a promoter and a terminator, a replication origin, etc., depending on the type of hosts into which they are to be introduced. The various nucleic acid and control sequences described above may be joined together to produce a recombinant expression vector, which may include one or more convenient restriction sites to allow for insertion or substitution of the nucleic acid sequence encoding the polypeptide at such sites. Alternatively, the nucleic acid sequence of the present invention may be expressed by inserting the nucleic acid sequence or a nucleic acid construct comprising the sequence into an appropriate vector for expression. In creating the expression vector, the coding sequence is located in the vector so that the coding sequence is operably linked with the appropriate control sequences for expression.

[0099] The recombinant expression vector may be any vector (e.g., a plasmid or virus), which can be conveniently subjected to recombinant DNA procedures and can bring about the expression of the polynucleotide sequence. The choice of the vector will typically depend on the compatibility of the vector with the host cell into which the vector is to be introduced. The vectors may be linear or closed circular plasmids. The expression vector may be an autonomously replicating vector (i.e., a vector that exists as an extrachromosomal entity), the replication of which is independent of chromosomal replication, (e.g., a plasmid, an extrachromosomal element, a minichromosome, or an artificial chromosome). The vector may contain any means for assuring self-replication. Alternatively, the vector may be one which, when introduced into the host cell, is integrated into the genome and replicated together with the chromosome(s) into which it has been integrated. Furthermore, a single vector or plasmid or two or more vectors or plasmids which together contain the total DNA to be introduced into the genome of the host cell, or a transposon may be used.

[0100] The expression vector of the present invention preferably contains one or more selectable markers, which permit easy selection of transformed cells. A selectable marker can be a gene the product of which provides for biocide or viral resistance, resistance to heavy metals, prototrophy to auxotrophs, and the like. Examples of bacterial selectable markers are the dal genes from Bacillus subtilis or Bacillus licheniformis, or markers, which confer antibiotic resistance such as ampicillin, kanamycin, chloramphenicol, or tetracycline resistance. Suitable markers for yeast host cells are ADE2, HIS3, LEU2, LYS2, METS, TRP1, and URA3.

[0101] Selectable markers for use in a filamentous fungal host cell include, but are not limited to, amdS (acetamidase), argB (ornithine carbamoyltransferase), bar (phosphinothricin acetyltransferase), hph (hygromycin phosphotransferase), niaD (nitrate reductase), pyrG (orotidine-5′-phosphate alpha-dioxygenase), sC (sulfate adenyltransferase), and trpC (anthranilate synthase), as well as equivalents thereof. Embodiments for use in an Aspergillus cell include the amdS and pyrG genes of Aspergillus nidulans or Aspergillus oryzae and the bar gene of Streptomyces hygroscopicus.

[0102] The expression vectors of the present invention can contain one or more element(s) that permit integration of the vector into the host cell's genome or autonomous replication of the vector in the cell independent of the genome. For integration into the host cell genome, the vector may rely on the nucleic acid sequence encoding the polypeptide or any other element of the vector for integration of the vector into the genome by homologous or nonhomologous recombination.

[0103] Alternatively, the expression vector may contain additional nucleic acid sequences for directing integration by homologous recombination into the genome of the host cell. The additional nucleic acid sequences enable the vector to be integrated into the host cell genome at a precise location(s) in the chromosome(s). To increase the likelihood of integration at a precise location, the integrational elements should preferably contain a sufficient number of nucleic acids, such as 100 to 10,000 base pairs, preferably 400 to 10,000 base pairs, and most preferably 800 to 10,000 base pairs, which are highly homologous with the corresponding target sequence to enhance the probability of homologous recombination. The integrational elements may be any sequence that is homologous with the target sequence in the genome of the host cell. Furthermore, the integrational elements may be non-encoding or encoding nucleic acid sequences. On the other hand, the vector may be integrated into the genome of the host cell by non-homologous recombination.

[0104] For autonomous replication, the vector may further comprise an origin of replication enabling the vector to replicate autonomously in the host cell in question. Non-limiting examples of bacterial origins of replication are P15A ori or the origins of replication of plasmids pBR322, pUC19, pACYC177 (which plasmid has the P15A ori), or pACYC184 permitting replication in E. coli, and pUB110, pE194, or pTA1060, permitting replication in Bacillus. Examples of origins of replication for use in a yeast host cell are the 2 micron origin of replication, ARS1, ARS4, the combination of ARS1 and CEN3, and the combination of ARS4 and CEN6. The origin of replication may be one having a mutation which makes it's functioning temperature-sensitive in the host cell (See, e.g., Ehrlich, Proc. Natl. Acad. Sci. USA 75:1433 [1978]).

[0105] More than one copy of a nucleic acid sequence of the present invention may be inserted into a host cell to increase production of the gene product. An increase in the copy number of the nucleic acid sequence can be obtained by integrating at least one additional copy of the sequence into the host cell genome or by including an amplifiable selectable marker gene with the nucleic acid sequence where cells containing amplified copies of the selectable marker gene, and thereby additional copies of the nucleic acid sequence, can be selected for by cultivating the cells in the presence of the appropriate selectable agent.

[0106] Many of the expression vectors for use in the present invention are commercially available. Suitable commercial expression vectors include, but are not limited to, p3×FLAG™ expression vectors (Sigma-Aldrich), which include a CMV promoter and hGH polyadenylation site for expression in mammalian host cells and a pBR322 origin of replication and ampicillin resistance markers for amplification in E. coli. Other commercially available suitable expression vectors include but are not limited to the pBluescriptII SK(−) and pBK-CMV vectors (Stratagene), and plasmids derived from pBR322 (Gibco BRL), pUC (Gibco BRL), pREP4, pCEP4 (Invitrogen) or pPoly (See, Lathe et al., Gene 57:193-201 [1987]).

[0107] The skilled person will appreciate that, upon production of an enzyme, in particular, depending upon the cell line used and the particular amino acid sequence of the enzyme, post-translational modifications may occur. For example, such post-translational modifications may include the cleavage of certain leader sequences, the addition of various sugar moieties in various glycosylation and phosphorylation patterns, deamidation, oxidation, disulfide bond scrambling, isomerisation, C-terminal lysine clipping, and N-terminal glutamine cyclisation. The present invention encompasses the use of alpha-dioxygenase enzymes that have been subjected to, or have undergone, one or more post-translational modifications. Thus, the alpha-dioxygenases of the invention include one which has undergone a post-translational modification, such as described herein.

[0108] Deamidation is an enzymatic reaction primarily converting asparagine (N) to iso-aspartic acid (iso-aspartate) and aspartic acid (aspartate) (D) at approximately 3:1 ratio. This deamidation reaction is, therefore, related to isomerization of aspartate (D) to iso-aspartate. The deamidation of asparagine and the isomerisation of aspartate, both involve the intermediate succinimide. To a much lesser degree, deamidation can occur with glutamine residues in a similar manner Oxidation can occur during production and storage (i.e., in the presence of oxidizing conditions) and results in a covalent modification of a protein, induced either directly by reactive oxygen species, or indirectly by reaction with secondary by-products of oxidative stress. Oxidation happens primarily with methionine residues, but may occur at tryptophan and free cysteine residues. Disulfide bond scrambling can occur during production and basic storage conditions. Under certain circumstances, disulfide bonds can break or form incorrectly, resulting in unpaired cysteine residues (—SH). These free (unpaired) sulfhydryls (—SH) can promote shuffling. N-terminal glutamine (Q) and glutamate (glutamic acid) (E) in the alpha-dioxygenases are likely to form pyroglutamate (pGlu) via cyclization. Most pGlu formation happens in manufacturing, but it can be formed non-enzymatically, depending upon pH and temperature of processing and storage conditions. C-terminal lysine clipping is an enzymatic reaction catalyzed by carboxypeptidases and is commonly observed in enzymes. Variants of this process include removal of lysine from the enzymes from the recombinant host cell. In the present invention, the post-translational modifications and changes in primary amino acid sequence described above do not result in significant changes in the activity of the alpha-dioxygenase enzymes.

[0109] Host Cells for Expression of Alpha-Dioxygenase Polypeptides

[0110] In another aspect, the present invention provides a host cell comprising a polynucleotide encoding an alpha-dioxygenase polypeptide of the present invention, the polynucleotide being operatively linked to one or more control sequences for expression of the alpha-dioxygenase enzyme in the host cell. Host cells for use in expressing the alpha-dioxygenase polypeptides encoded by the expression vectors of the present invention are well known in the art and include but are not limited to bacterial cells, (e.g. E. coli, Geobacillus stearothermophilus, Pseudomonas aeruginosa, Lactobacillus kefir, Lactobacillus brevis, Lactobacillus minor, Mycobacterium tuberculosis, Streptomyces coelicolor and Salmonella typhimurium), fungal cells (e.g. Trichoderma reesei and Aspergillus niger), yeast cells (e.g., Saccharomyces cerevisiae, Kluyveromyces lactis or Pichia pastoris), insect cells (e.g. Drosophila S2 and Spodoptera Sf9), animal cells (e.g. CHO, COS, BHK, 293, and Bowes melanoma cells), and plant cells (e.g. Nicotiana genus and Zea mays). Appropriate culture media and growth conditions for the above-described host cells are well known in the art.

[0111] Host cells of the present invention may also include, for example, host cells that produce excess quantities of free fatty acids. Host cells that produce excess quantities of free fatty acids may be modified to produce excess quantities of free fatty acids as compared to a corresponding unmodified host cell. The modification may be, for example, genetic modification. Where the modification is a genetic modification, a corresponding unmodified host cell may be, for example, a host cell that lacks the same genetic modification facilitating the production of excess quantities of free fatty acids in the modified host cell. Host cells that produce excess quantities of free fatty acids, as well as methods of making such host cells, are known in the art. In embodiments, beta-oxidation may be eliminated in the host cell, which leads to reduced utilization of fatty acids. Elimination of beta-oxidation in a host cell such as, for example, E. coli, may be accomplished via a ΔfadD deletion, or deletion of a homolog of fadD. In embodiments, the host cell is engineered to encourage production of fatty acids from precursors. This may be accomplished, for example, by the overexpression of one or more thioesterases such as, for example, TesA′ and FatB1, from Cinnamomum camphorum. In embodiments, the host cell is engineered to encourage production of malonyl-coA, which is involved in elongating fatty acid chains. This may be accomplished, for example, by the overexpression of an acetyl-coA carboxylase (ACC) such as, for example, the acetyl-coA carboxylase (ACC) from E. coli. In embodiments, the host cell is engineered to limit the fatty acid yield to shorter chain fatty acids in the C12-C14 range. This may be accomplished, for example, by the overexpression of the thioesterase from Umbellularia californica (UcTE) (Lennen et al., Trends in Cell Biology 30:12, pp. 659-667, 2012). In embodiments, the host cell is engineered for reverse beta-oxidation. Host cells such as, for example, E. coli, may be engineered for reverse beta-oxidation by, for example, reducing or eliminating the activity of the fadR, atoC(c), crp, arcA, adhE, pta, frdA, fucO, yqhD, and fadD genes or homologs thereof, as well as overexpressing FadBA and at least one thioesterase from the group including TesA TesB, FadM, and YciA, or homologs thereof. The particular thioesterase overexpressed may impact the chain length distribution of the final products (Dellomonaco et al., Nature 475, pp. 355-359, 2011). In embodiments, host cells of the present disclosure may overexpress a FatB2 protein from Umbellularia californica, which may be codon-optomized.

[0112] Polynucleotides for expression of the alpha-dioxygenase may be introduced into cells by various methods known in the art. Techniques include among others, electroporation, biolistic particle bombardment, liposome mediated transfection, calcium chloride transfection, and protoplast fusion. Various methods for introducing polynucleotides into cells will be apparent to the skilled artisan.

[0113] Methods of Producing Alpha-Dioxygenase Polypeptides

[0114] Standard methods of culturing organisms such as, for example, bacteria and yeast, for production of enzymes are well-known in the art and are described herein. For example, host cells may be cultured in a standard growth media under standard temperature and pressure conditions, and in an aerobic environment. Standard growth media for various host cells are commercially available and well-known in the art, as are standard conditions for growing various host cells.

[0115] Alpha-dioxygenase enzymes expressed in a host cell can be recovered from the cells and or the culture medium using any one or more of the well-known techniques for protein purification, including, among others, lysozyme treatment, sonication, filtration, salting-out, ultra-centrifugation, and chromatography. Suitable solutions for lysing and the high efficiency extraction of proteins from bacteria, such as E. coli, are commercially available under the trade name CelLytic B (Sigma-Aldrich). Chromatographic techniques for isolation of the alpha-dioxygenase polypeptide include, among others, reverse phase chromatography high performance liquid chromatography (HPLC), ion exchange chromatography, gel electrophoresis, and affinity chromatography. Conditions for purifying a particular enzyme will depend, in part, on factors such as net charge, hydrophobicity, hydrophilicity, molecular weight, molecular shape, etc., and will be apparent to those having skill in the art.

[0116] The alpha-dioxygenases may also be prepared and used in the form of cells expressing the enzymes, as crude extracts, or as isolated or purified preparations. The alpha-dioxygenases may be prepared as lyophilizates, in powder form (e.g., acetone powders), or prepared as enzyme solutions. In embodiments, the alpha-dioxygenases can be in the form of substantially pure preparations.

[0117] Cleaning Compositions

[0118] In certain embodiments, the present invention relates to cleaning compositions comprising a fatty acid alpha-dioxygenase. The cleaning compositions, when used to contact soiled surfaces having disposed thereon soils comprising fatty acid, can convert the fatty acid of the soil into an enzymatic product, such as a 2-hydroperoxy fatty acid. In this regard, the cleaning compositions of the present invention can exhibit improved cleaning performance, or equivalent cleaning performance while utilizing lower levels of surfactant in the cleaning composition. Preferred fatty acids are stearic acid, oleic acid, linoleic acid, and linolenic acid.

[0119] Cleaning compositions of the present invention include, but are not limited to, compositions for treating hair (human, dog, and/or cat), including, bleaching, coloring, dyeing, conditioning, growing, removing, retarding growth, shampooing, styling; deodorants and antiperspirants; personal cleansing; products, and/or methods relating to treating skin (human, dog, and/or cat), including application of creams, lotions, and other topically applied products for consumer use; shaving; body sprays; compositions for treating fabrics, hard surfaces and any other surfaces in the area of fabric and home care, including: air care, car care, dishwashing, fabric conditioning (including softening), laundry detergency, laundry and rinse additive and/or care, hard surface cleaning and/or treatment, and other cleaning for consumer or institutional use; hand soaps, shampoos, lotions, oral care implements; products such as wet or dry bath tissue, facial tissue, disposable handkerchiefs, disposable towels, and/or wipes. In preferred aspects, the cleaning composition is a detergent composition.

[0120] Preferred cleaning compositions herein include fabric cleaning compositions, hard surface cleaning compositions, dishwashing compositions, and hair cleaning compositions. Such compositions typically comprise a consumer product adjunct ingredient(s).

[0121] A cleaning composition of the present invention may be a manual dishwashing composition, preferably in liquid form. It typically contains from 30% to 95%, preferably from 40% to 90%, more preferably from 50% to 85% by weight of the composition of a liquid carrier in which the other essential and optional components are dissolved, dispersed or suspended. One preferred component of the liquid carrier is water.

[0122] The pH of a cleaning composition of the present invention, measured as a 10% product concentration in demineralized water at 20° C., may be adjusted to between 3 and 14, more preferably between 4 and 13, more preferably between 6 and 12 and most preferably between 8 and 10. The pH of the cleaning composition can be adjusted using pH modifying ingredients known in the art.

[0123] The cleaning composition herein may optionally comprise a number of other cleaning adjunct ingredients such as enzyme stabilizers, surfactants, co-enzymes, salts, hydrotropes, chelants, builders, dispersants, dye transfer inhibitors, bleach, stabilizers/thickeners, perfume, conditioning agents, hueing agents, structurants, solvents, aqueous carrier, and mixtures thereof. Consumer product adjunct ingredients also include scrubbing particles, malodor control agents, pigments, dyes, opacifiers, pH adjusters and buffering means (e.g., carboxylic acids such as citric acid, HCl, NaOH, KOH, alkanolamines, phosphoric and sulfonic acids, carbonates such as sodium carbonates, bicarbonates, sesquicarbonates, borates, silicates, phosphates, imidazole and alike).

[0124] Enzyme Stabilizers

[0125] The composition of the present invention may comprise an enzyme stabilizer, selected from the group consisting of chemical and physical stabilizers, preferably the physical stabilizer comprises encapsulating the enzyme. Suitable enzyme stabilizers may be selected from the group consisting of (a) univalent, bivalent and/or trivalent cations preferably selected from the group of inorganic or organic salts of alkaline earth metals, alkali metals, aluminum, iron, copper and zinc, preferably alkali metals and alkaline earth metals, preferably alkali metal and alkaline earth metal salts with halides, sulfates, sulfites, carbonates, hydrogencarbonates, nitrates, nitrites, phosphates, formates, acetates, propionates, citrates, maleates, tartrates, succinates, oxalates, lactates, and mixtures thereof. In a preferred embodiment the salt is selected from the group consisting of sodium chloride, calcium chloride, potassium chloride, sodium sulfate, potassium sulfate, sodium acetate, potassium acetate, sodium formate, potassium formate, calcium lactate, calcium nitrate and mixtures thereof. Most preferred are salts selected from the group consisting of calcium chloride, potassium chloride, potassium sulfate, sodium acetate, potassium acetate, sodium formate, potassium formate, calcium lactate, calcium nitrate, and mixtures thereof, and in particular potassium salts selected from the group of potassium chloride, potassium sulfate, potassium acetate, potassium formate, potassium propionate, potassium lactate and mixtures thereof. Most preferred are potassium acetate and potassium chloride. Preferred calcium salts are calcium formate, calcium lactate and calcium nitrate including calcium nitrate tetrahydrate. Calcium and sodium formate salts may be preferred. These cations are present at at least about 0.01 wt %, preferably at least about 0.03 wt %, more preferably at least about 0.05 wt %, most preferably at least about 0.25 wt % up to 2 wt % or even up to 1 wt % by weight of the total composition. These salts are formulated from 0.1 wt % to 5 wt %, preferably from 0.2 wt % to 4 wt %, more preferably from 0.3 wt % to 3 wt %, most preferably from 0.5 wt % to 2 wt % relative to the total weight of the composition. Further enzyme stabilizers can be selected from the group (b) carbohydrates selected from the group consisting of oligosaccharides, polysaccharides and mixtures thereof, such as a monosaccharide glycerate as described in WO201219844; (c) mass efficient reversible protease inhibitors selected from the group consisting of phenyl boronic acid and derivatives thereof, preferably 4-formyl phenylboronic acid; (d) alcohols such as 1,2-propane diol, propylene glycol; (e) peptide aldehyde stabilizers such as tripeptide aldehydes such as Cbz-Gly-Ala-Tyr-H, or disubstituted alaninamide; (1) carboxylic acids such as phenyl alkyl dicarboxylic acid as described in WO2012/19849 or multiply substituted benzyl carboxylic acid comprising a carboxyl group on at least two carbon atoms of the benzyl radical such as described in WO2012/19848, phthaloyl glutamine acid, phthaloyl asparagine acid, aminophthalic acid and/or an oligoamino-biphenyl-oligocarboxylic acid; and (g) mixtures thereof.

[0126] Antioxidants

[0127] Antioxidant compounds and free radical scavengers can generally protect enzyme from degradation by preventing excessive generation of singlet oxygen and peroxy radicals that promote alteration of enzyme structure leading to short TON of Enzymes. Not to be limited by theory, a general discussion of the mode of action for antioxidants and free radical scavengers is disclosed in Kirk Othmer, The Encyclopedia of Chemical Technology, Volume 3, pages 128-148, Third Edition (1978).

[0128] The composition may optionally contain an anti-oxidant present from about 0.001 to about 2% by weight. Preferably the antioxidant is present at a concentration in the range 0.01 to 0.1% by weight. Mixtures of anti-oxidants may be used and in some embodiments, may be preferred. One or more antioxidants may be incorporated the composition.

[0129] One class of anti-oxidants used in the present invention is alkylated phenols, having the general formula:

[chemical structure]

wherein R is C1-C22 linear or branched alkyl, preferably methyl or branched C3-C6 alkyl, C1-C6 alkoxy, preferably methoxy, or CH2CH2C(O)OR′, wherein R′ is H, a charge balancing counterion or C1-C22 linear or branched alkyl; Ri is a C3-C6 branched alkyl, preferably tert-butyl; x is 1 or 2. Hindered phenolic compounds are a preferred type of alkylated phenols having this formula. A preferred hindered phenolic compound of this type is 3,5-di-tert-butyl-4-hydroxytoluene (BHT).

[0130] Furthermore, the anti-oxidant used in the composition may be selected from the group consisting of a-, b-, g-, d-tocopherol, ethoxyquin, 2, 2 4-trimethyl-1,2-dihydroquinoline, 2,6-di-tert-butyl hydroquinone, tert-butyl hydroxyanisole, lignosulphonic acid and salts thereof, and mixtures thereof. It is noted that ethoxyquin (1,2-dihydro-6-ethoxy-2,2,4-trimethylquinoline) is marketed under the name Raluquin™ by the company Raschig™. Other types of anti-oxidants that may be used in the composition are 6-hydroxy-2,5,7,8-tetramethylchroman-2-carboxylic acid (Trolox™) and 1,2-benzisothiazoline-3-one (Proxel GXL™).

[0131] A further class of anti-oxidants which may be suitable for use in the composition is a benzofuran or benzopyran derivative having the formula:

[chemical structure]

wherein R1 and R2 are each independently linear or branched C1-C22 alkyl or R1 and R2 can be taken together to form a C5-C6 cyclic hydrocarbyl moiety; B is absent or CH2; R4 is C1-C4 alkyl; R5 is hydrogen or —C(0)R3 wherein R3 is hydrogen or C1-C19 alkyl; R6 is C1-C4 alkyl; R7 is hydrogen or C1-C4 alkyl; X is —CH2OH, or —CH2A wherein A is a nitrogen comprising unit, phenyl, or substituted phenyl. Preferred nitrogen comprising A units include amino, pyrrolidino, piperidino, morpholino, piperazino, and mixtures thereof.

[0132] Anti-oxidants such as tocopherol sorbate, butylated hydroxyl benxoic acids and their salts, gallic acid and its alkyl esters, ascorbic, citric, tartric, uric acid and its salts, sorbic acid and its salts, and dihydroxyfumaric acid and its salts may also be used. In one aspect, the most preferred types of anti-oxidant for use in the composition are 3,5-di-tert-butyl-4-hydroxytoluene (BHT), a-, b-, g-, d-tocopherol, 1,2-benzisothiazoline-3-one (Proxel GXL™) anthocyanins, carotene, catechins, flavonoids, lutein, lycopene and mixtures thereof. In another aspect, the most preferred types of anti-oxidant for use in the composition are hindered phenols, diarylamines (including phenoxazines with a maximum molar extinction coefficient in the wavelength range from 400 to 750 nm of less than 1,000 M cm⁻¹), and mixtures thereof. In preferred mixtures, the number of equivalents of hindered phenol initially formulated will normally be greater than or equal to the number of equivalents of diarylamine

[0133] Surfactants

[0134] The cleaning compositions of the present invention may comprise greater than about 0.1% by weight of a surfactant or mixture of surfactants. Surfactant levels cited herein are on a 100% active basis, even though common raw materials such as sodium lauryl sulphate may be supplied as aqueous solutions of lower activity. In embodiments of the present invention, a cleaning composition may include surfactant in an amount of from about 1 wt % to about 60 wt %, from about 5 wt % to about 50 wt %, by weight of the cleaning composition.

[0135] Suitable surfactants for use herein include anionic surfactants, amphoteric surfactants, nonionic surfactants, zwitterionic surfactants, cationic surfactants, and mixtures thereof. In embodiments, the cleaning composition comprises one or more anionic surfactants and one or more co-surfactants selected from the group consisting of amphoteric surfactant, zwitterionic surfactant, and mixtures thereof.

[0136] Useful anionic surfactants herein include the water-soluble salts of alkyl sulphates and alkyl ether sulphates having from 10 to 18 carbon atoms in the alkyl radical and the water-soluble salts of sulphonated monoglycerides of fatty acids having from 10 to 18 carbon atoms. Sodium lauryl sulphate and sodium coconut monoglyceride sulphonates are examples of anionic surfactants of this type.

[0137] Suitable cationic surfactants useful in the present invention can be broadly defined as derivatives of aliphatic quaternary ammonium compounds having one long alkyl chain containing from about 8 to 18 carbon atoms such as lauryl trimethylammonium chloride; cetyl pyridinium chloride; benzalkonium chloride; cetyl trimethylammonium bromide; di-isobutylphenoxyethyl-dimethylbenzylammonium chloride; coconut alkyltrimethyl-ammonium nitrite; cetyl pyridinium fluoride; etc. Certain cationic surfactants can also act as germicides in the compositions disclosed herein.

[0138] Suitable nonionic surfactants that can be used in the compositions of the present invention can be broadly defined as compounds produced by the condensation of alkylene oxide groups (hydrophilic in nature) with an organic hydrophobic compound which may be aliphatic and/or aromatic in nature. Examples of suitable nonionic surfactants include the poloxamers; sorbitan derivatives, such as sorbitan di-isostearate; ethylene oxide condensates of hydrogenated castor oil, such as PEG-30 hydrogenated castor oil; ethylene oxide condensates of aliphatic alcohols or alkyl phenols; products derived from the condensation of ethylene oxide with the reaction product of propylene oxide and ethylene diamine; long chain tertiary amine oxides; long chain tertiary phosphine oxides; long chain dialkyl sulphoxides and mixtures of such materials. These materials are useful for stabilising foams without contributing to excess viscosity build for the cleaning composition.

[0139] Zwitterionic surfactants can be broadly described as derivatives of aliphatic quaternary ammonium, phosphonium, and sulphonium compounds, in which the aliphatic radicals can be straight chain or branched, and wherein one of the aliphatic substituents contains from about 8 to 18 carbon atoms and one contains an anionic water-solubilising group, e.g., carboxy, sulphonate, sulphate, phosphate or phosphonate.

[0140] Surfactants can provide a desirable foaming quality. Suitable surfactants are those which are reasonably stable and foam throughout a wide pH range. The surfactant may be anionic, nonionic, amphoteric, zwitterionic, cationic, or mixtures thereof. Anionic surfactants useful herein include the water-soluble salts of alkyl sulfates having from 8 to 20 carbon atoms in the alkyl radical (e.g., sodium alkyl sulfate) and the water-soluble salts of sulfonated monoglycerides of fatty acids having from 8 to 20 carbon atoms. Sodium lauryl sulfate and sodium coconut monoglyceride sulfonates are examples of anionic surfactants of this type. Other suitable anionic surfactants are sarcosinates, such as sodium lauroyl sarcosinate, taurates, sodium lauryl sulfoacetate, sodium lauroyl isethionate, sodium laureth carboxylate, and sodium dodecyl benzenesulfonate. Mixtures of anionic surfactants can also be employed. Many suitable anionic surfactants are disclosed by Agricola et al., U.S. Pat. No. 3,959,458, issued May 25, 1976, incorporated herein in its entirety by reference. Nonionic surfactants which can be used in the compositions of the present invention can be broadly defined as compounds produced by the condensation of alkylene oxide groups (hydrophilic in nature) with an organic hydrophobic compound which may be aliphatic or alkyl-aromatic in nature. Examples of suitable nonionic surfactants include poloxamers (sold under trade name Pluronic), polyoxyethylene, polyoxyethylene sorbitan esters (sold under trade name Tweens), fatty alcohol ethoxylates, polyethylene oxide condensates of alkyl phenols, products derived from the condensation of ethylene oxide with the reaction product of propylene oxide and ethylene diamine, ethylene oxide condensates of aliphatic alcohols, long chain tertiary amine oxides, long chain tertiary phosphine oxides, long chain dialkyl sulfoxides, and mixtures of such materials. The amphoteric surfactants useful in the present invention can be broadly described as derivatives of aliphatic secondary and tertiary amines in which the aliphatic radical can be a straight chain or branched and wherein one of the aliphatic substituents contains from about 8 to about 18 carbon atoms and one contains an anionic water-solubilizing group, e.g., carboxylate, sulfonate, sulfate, phosphate, or phosphonate. Other suitable amphoteric surfactants are betaines, specifically cocamidopropyl betaine. Mixtures of amphoteric surfactants can also be employed. Many of these suitable nonionic and amphoteric surfactants are disclosed by Gieske et al., U.S. Pat. No. 4,051,234, issued Sep. 27, 1977, incorporated herein by reference in its entirety. The present composition typically comprises one or more surfactants each at a level of from about 0.1% to about 25%, preferably from about 0.5% to about 8%, and most preferably from about 1% to about 6%, by weight of the composition.

[0141] Source of Hydrogen Peroxide

[0142] It may be preferred for the composition to comprise a source of hydrogen peroxide. Sources of hydrogen peroxide include, for example, inorganic perhydrate salts, including alkali metal salts such as sodium salts of perborate (usually mono- or tetra-hydrate), percarbonate, persulphate, perphosphate, persilicate salts and mixtures thereof. In one aspect of the invention the inorganic perhydrate salts are selected from the group consisting of sodium salts of perborate, percarbonate and mixtures thereof. In some compositions, percarbonate salts are preferred. When employed, inorganic perhydrate salts are typically present in amounts of from 0.05 to 40 wt %, or 1 to 30 wt % of the overall cleaning composition and are typically incorporated into such compositions as a crystalline solid that may be coated. Suitable coatings include, inorganic salts such as alkali metal silicate, carbonate or borate salts or mixtures thereof, or organic materials such as water-soluble or dispersible polymers, waxes, oils or fatty soaps. These may be present in combination with bleach activators and/or bleach catalysts. In other compositions, hydrogen peroxide is preferred. When employed, hydrogen peroxide is typically present in amounts of from 0.05 to 40 wt %, or 1 to 30 wt % of the overall cleaning composition.

[0143] Suitable bleach activators are those having R-(C═O)-L wherein R is an alkyl group, optionally branched, having, when the bleach activator is hydrophobic, from 6 to 14 carbon atoms, or from 8 to 12 carbon atoms and, when the bleach activator is hydrophilic, less than 6 carbon atoms or even less than 4 carbon atoms; and L is leaving group. Examples of suitable leaving groups are benzoic acid and derivatives thereof—especially benzene sulphonate. Suitable bleach activators include dodecanoyl oxybenzene sulphonate, decanoyl oxybenzene sulphonate, decanoyl oxybenzoic acid or salts thereof, 3,5,5-trimethyl hexanoyloxybenzene sulphonate, tetraacetyl ethylene diamine (TAED) and nonanoyloxybenzene sulphonate (NOBS). While any suitable bleach activator may be employed, it may be preferred if the subject composition comprises NOBS, TAED or mixtures thereof.

[0144] Suitable bleach catalysts include one or more bleach catalysts capable of accepting an oxygen atom from a peroxyacid and/or salt thereof and transferring the oxygen atom to an oxidizeable substrate. Suitable bleach catalysts include, but are not limited to: iminium cations and polyions; iminium zwitterions; modified amines; modified amine oxides; N-sulphonyl imines; N-phosphonyl imines; N-acyl imines; thiadiazole dioxides; perfluoroimines; cyclic sugar ketones and alpha amino-ketones and mixtures thereof.

[0145] Suitable bleach catalysts include oxaziridinium bleach catalysts, transition metal bleach catalysts, especially manganese and iron bleach catalysts. A suitable bleach catalyst has a structure corresponding to general formula below:

[chemical structure]

wherein R¹³ is selected from the group consisting of 2-ethylhexyl, 2-propylheptyl, 2-butyloctyl, 2-pentylnonyl, 2-hexyldecyl, n-dodecyl, n-tetradecyl, n-hexadecyl, n-octadecyl, iso-nonyl, iso-decyl, iso-tridecyl and iso-pentadecyl.

[0146] Another suitable source of hydrogen peroxide includes pre-formed peracids. Suitable preformed peracids include, but are not limited to compounds selected from the group consisting of pre-formed peroxyacids or salts thereof typically a percarboxylic acids and salts, percarbonic acids and salts, perimidic acids and salts, peroxymonosulfuric acids and salts, for example, Oxone®, and mixtures thereof. Suitable examples include peroxycarboxylic acids or salts thereof, or peroxysulphonic acids or salts thereof. Typical peroxycarboxylic acid salts suitable for use herein have a chemical structure corresponding to the following chemical formula:

[chemical structure]

[0147] wherein: R¹⁴ is selected from alkyl, aralkyl, cycloalkyl, aryl or heterocyclic groups; the R¹⁴ group can be linear or branched, substituted or unsubstituted; having, when the peracid is hydrophobic, from 6 to 14 carbon atoms, or from 8 to 12 carbon atoms and, when the peracid is hydrophilic, less than 6 carbon atoms or even less than 4 carbon atoms and Y is any suitable counter-ion that achieves electric charge neutrality, preferably Y is selected from hydrogen, sodium or potassium. R¹⁴ may be a linear or branched, substituted or unsubstituted C₆₋₉ alkyl. The peroxyacid or salt thereof may be selected from peroxyhexanoic acid, peroxyheptanoic acid, peroxyoctanoic acid, peroxynonanoic acid, peroxydecanoic acid, any salt thereof, or any combination thereof. Peroxyacids that may be used include phthalimido-peroxy-alkanoic acids, in particular ε-phthalimido peroxy hexanoic acid (PAP). The peroxyacid or salt thereof may have a melting point in the range of from 30° C. to 60° C.

[0148] The pre-formed peroxyacid or salt thereof can also be a peroxysulphonic acid or salt thereof, typically having a chemical structure corresponding to the following chemical formula:

[chemical structure]

[0149] wherein: R¹⁵ is selected from alkyl, aralkyl, cycloalkyl, aryl or heterocyclic groups; the R¹⁵ group can be linear or branched, substituted or unsubstituted; and Z is any suitable counter-ion that achieves electric charge neutrality, preferably Z is selected from hydrogen, sodium or potassium. Preferably R¹⁵ is a linear or branched, substituted or unsubstituted C₄₋₁₄, preferably C6-14 alkyl. Preferably such bleach components may be present in the compositions of the invention in an amount from 0.01 to 50%, most preferably from 0.1% to 20%.

[0150] Hydrogen peroxide may also be provided by the incorporation of one or more hydrogen peroxide producing enzymes such as alcohol oxidoreductases, aldehyde oxidoreductases, amino acid oxidoreductases, and monoamine oxidases. These enzymes can convert in situ (e.g. in the washing process) substrates such as carbohydrates, proteins, amino acids, alcohols, amines, or other substrates either from a soil or from a material also present in the composition, to generate hydrogen peroxide. Since this will tend to generate low levels of hydrogen peroxide this may be preferred. Non-limiting examples of hydrogen peroxide producing enzymes are: glycolate oxidases (EC 1.1.3.1), L-lactate oxidases (EC 1.1.3.2), malate oxidases (EC 1.1.3.3), glucose oxidases (EC 1.1.3.4), glycerol oxidases (EC 1.1.3.B4), hexose oxidases (EC 1.1.3.5), cholesterol oxidases (EC 1.1.3.6), aryl-alcohol oxidases (EC 1.1.3.7), L-gulonolactone oxidases (EC 1.1.3.8), galactose oxidases (EC 1.1.3.9), pyranose oxidases (EC 1.1.3.10), L-sorbose oxidases (EC 1.1.3.11), alcohol oxidases (EC 1.1.3.13), (S)-2-hydroxy-acid oxidases (EC 1.1.3.15), chlorine oxidases (EC 1.1.3.17), secondary-alcohol oxidases (EC 1.1.3.18), long-chain-alcohol oxidases (EC 1.1.3.20), thiamine oxidases (EC 1.1.3.23), nucleoside oxidases (EC 1.1.3.28, EC 1.1.3.39), polyvinyl-alcohol oxidases (EC 1.1.3.30), vanillyl-alcohol oxidases (EC 1.1.3.38), D-mannitol oxidase ((EC 1.1.3.40), alditol oxidases (EC 1.1.3.41), glucooligosaccharide oxidases (EC 1.1.99.B3), cellobiose dehydrogenase (EC 1.1.99.18), aldehyde oxidases (EC 1.2.3.1), pyruvate oxidases (EC 1.2.3.3), oxalate oxidases (EC 1.2.3.4), glyoxylate oxidases (EC 1.2.3.5), D-aspartate oxidases (EC 1.4.3.1), L-amino acid oxidases (EC 1.4.3.2), D-amino acid oxidases (EC 1.4.3.3), monoamine oxidases (EC 1.4.3.4), D-glutamate oxidases (EC 1.4.3.7), ethanolamine oxidases (EC 1.4.3.8), protein-lysine 6-oxidases (EC 1.4.3.13), L-lysine oxidases (EC 1.4.3.14), D-glutamate (D-aspartate) oxidases (EC 1.4.3.15), L-aspartate oxidases (EC 1.4.3.16), glycine oxidases (EC 1.4.3.19), L-lysine 6-oxidases (EC 1.4.3.20), primary-amine oxidases (EC 1.4.3.21), diamine oxidases (EC 1.4.3.22), L-arginine oxidases (EC 1.4.3.25), non-specific polyamine oxidases (EC 1.5.3.17), other alcohol oxidoreductases (EC 1.1.X.X), other aldehyde oxidoreductases (EC 1.2.X.X), other amino acid oxidoreductases or monoamine oxidases (EC 1.3.X.X), and other amine oxidoreductases (EC 1.5.X.X). The hydrogen peroxide producing enzyme can be fused to the fatty acid alpha-dioxygenase to form a single polypeptide or can be independent enzymes.

[0151] In some embodiments, the hydrogen peroxide source can be substituted by: a) a source of nicotinamide adenine dinucleotide (NADH) or nicotinamide adenine dinucleotide phosphate (NADPH) and b) an enzymatic redox system. Non-limiting examples of enzymatic redox systems are: the reductase domain of Bacillus megaterium CYP102A1 (P450BM3), the RhFred reductase domain from Rhodococcus sp. NCIMB 9784, the flavodoxin (Fld)/ferrodoxin reductase (FdR, EC 1.18.1.2 and EC 1.18.1.3) redox system, the putidaredoxin (Pd)/putidaredoxin reductase (PdR, EC 1.18.1.5) system, the rubredoxin/rubredoxin reductase (EC 1.18.1.1 and EC 1.18.1.4) system, and the adrenoxin/adrenodoxin reductase (EC 1.18.1.6) system. In some embodiments, the composition may also comprise a dehydrogenase-based NADH or NADPH regeneration system, such as the phosphonate/phosphonate dehydrogenase (EC 1.20.1.1) system.

[0152] Method of Using the Cleaning Composition

[0153] The present invention relates to methods of cleaning a surface having disposed thereon a soil comprising fatty acid, said method comprising the steps of: a) contacting said soil disposed on said surface with a cleaning composition comprising a fatty acid alpha-dioxygenase; wherein said alpha-dioxygenase comprises a polypeptide sequence having at least about 70% identity to one or more sequences selected from the group consisting of: SEQ ID NO: 1, 2, 3, 4, 5, 6, 7, and their functional fragments thereof; preferably SEQ ID NO: 1, 2, and their functional fragments; and most preferably SEQ ID NO: 1, and its functional fragments; and b) converting said fatty acid of said soil on said surface into a material selected from the group consisting of 2-hydroperoxy fatty acids, 2-hydroperoxy fatty acid derivatives, and mixtures thereof. Suitable examples of 2-hydroperoxy fatty acid derivatives are 2-hydroxy fatty acid and terminal aldehydes.

[0154] The method can further comprise the step of removing the cleaning composition from the surface, e.g. by rinsing the composition from the surface (e.g. with water) or mechanically removing the composition from the surface (e.g. by wiping composition from the surface).

[0155] The method can further include the step of diluting the cleaning composition with water to form a diluted cleaning composition and then contacting the surface with the diluted cleaning composition.

[0156] Preferred surfaces treated with the cleaning composition of the present invention include surfaces selected from the group consisting of hair, skin, fabric, dishware, tableware, and household hard surfaces.

[0157] The present invention further relates to methods of cleaning a surface including a method of manually washing soiled articles, preferably dishware, comprising the step of: delivering a composition of the invention into a volume of water to form a wash solution and immersing the soiled articles in the wash solution, wherein the soil on the soiled articles comprise at least one fatty acid selected from the group consisting of: stearic acid, oleic acid, linoleic acid, linolenic acid, and mixtures thereof.

[0158] The fatty acid alpha-dioxygenase may be present at a concentration of from 0.005 ppm to 15 ppm, preferably from 0.01 ppm to 5 ppm, more preferably from 0.02 ppm to 0.5 ppm, in an aqueous wash liquor during the washing process. As such, the composition herein will be applied in its diluted form to the soiled surface. Soiled surfaces e.g. dishes are contacted with an effective amount, typically from 0.5 mL to 20 mL (per 25 dishes being treated), preferably from 3 mL to 10 mL, of the cleaning composition of the present invention, preferably in liquid form, diluted in water. The actual amount of cleaning composition used will be based on the judgment of user, and will typically depend upon factors such as the particular product formulation of the composition, including the concentration of active ingredients in the composition, the number of soiled surfaces to be cleaned, the degree of soiling on the surfaces, and the like.

[0159] The present invention also includes the use of fatty acid alpha-dioxygenases to provide increased suds longevity in an aqueous wash liquor comprising soil, wherein the soil comprises fatty acid. The enzymes are preferably comprised in a detergent composition, especially a detergent composition of the present invention, which is used for manually washing dishes.

### Test Methods

[0160] The following assays set forth must be used in order that the invention described and claimed herein may be more fully understood.

[0161] Test Method 1—Glass Vial Suds Mileage Method

[0162] The objective of the glass vial suds mileage test method is to measure the evolution of suds volume over time generated by a certain solution of detergent composition in the presence of a greasy soil, e.g., olive oil. The steps of the method are as follows:
[0163] 1. Test solutions are prepared by subsequently adding aliquots at room temperature of: a) 10 g of an aqueous detergent solution at specified detergent concentration and water hardness, b) 1.0 g of an aqueous protein (or mixture of proteins) solution at specified concentration and water hardness), and c) 0.11 g of olive oil (Bertolli, Extra Virgin Olive Oil), into a 40 mL glass vial (dimensions: 95 mm H×27.5 mm D). For the reference samples, the protein solutions are substituted with 1.0 mL of demineralized water.
[0164] 2. The test solutions are mixed in the closed test vials by stirring at room temperature for 2 minutes on a magnetic stirring plate (IKA, model # RTC B S001; VWR magnetic stirrer, catalog #58949-012; 500 RPM), followed by manually shaking for 20 seconds with an upwards downwards movement (about 2 up and down cycles per second, +/−30 cm up and 30 cm down).
[0165] 3. Following the shaking, the test solutions in the closed vials are further stirred on a magnetic stirring plate (IKA, model # RTC B S001; VWR magnetic stirrer, catalog #58949-012; 500 RPM) for 60 minutes inside a water bath at 46° C. to maintain a constant temperature. The samples are then shaken manually for another 20 seconds as described above and the initial suds heights (H1) are recorded with a ruler.
[0166] 4. The samples are incubated for an additional 30 minutes inside the water bath at 46° C. while stirring (IKA, model # RTC B S001; VWR magnetic stirrer, catalog #58949-012; 500 RPM), followed by manual shaking for another 20 seconds as described above. The final suds heights (H2) are recorded.
[0167] 5. Protein solutions that produce larger suds heights (H1 and H2), preferably combined with lower drops in suds height between H1 and H2, are more desirable.

[0168] Test Method 2—Small Sink Suds Mileage Method

[0169] The evolution of the suds volume generated by a solution of a liquid detergent composition can be determined while adding soil loads periodically as follows. An aliquot of 500 mL of solution of the liquid detergent composition in 15 dH hard water (final concentration of 0.12 w %, initial temperature 46° C.) is added into a cylindrical container (dimensions: 150 mm D×150 mm H). The container is incubated in a water bath during the test to maintain the temperature of the solution between 46° C. and 40° C. An initial suds volume is generated in the container by mechanical agitation at 135 rpm for 120 seconds with a paddle (dimensions: 50 mm×25 mm) positioned in the middle of the container.

[0170] Then, an aliquot of 0.5 mL of greasy soil (composition: see TABLE 1, 0.5 mL) is dosed into the solution using a 20-mL syringe and an automated pump (KDS Legato 110 Single Syringe I/W Pump), while the paddle rotates into the solution at 135 rpm for 14 seconds. After mixing, the solution is incubated for 166 additional seconds before the next cycle. The soil injecting, paddling, and incubation steps are repeated every 180 seconds until the end-point is reached and the amount of soil additions needed is recorded. The end-point occurs when a clear suds-free ring that circles the impeller at least half way around is observed two or more consecutive times. The complete process is repeated a number of times and the average of the number of additions for all the replicates is calculated for each liquid detergent composition.

[0171] Finally, the suds mileage index is then calculated as: (average number of soil additions for test liquid detergent composition)/(average number of soil additions for reference liquid detergent composition)×100. Pending on the test purpose the skilled person could choose to select an alternative water hardness, solution temperature, product concentration or soil type.

TABLE 1
Greasy Soil Composition

| Ingredient | Weight % |
|---|---|
| Crisco oil | 12.730 |
| Crisco shortening | 27.752 |
| Lard | 7.638 |
| Refined Rendered Edible Beef Tallow | 51.684 |
| Oleic Acid, 90% (Techn) | 0.139 |
| Palmitic Acid, 99+% | 0.036 |
| Stearic Acid, 99+% | 0.021 |

### EXAMPLES

[0172] The following examples are provided to further illustrate the present invention and are not to be construed as limitations of the present invention, as many variations of the present invention are possible without departing from its spirit or scope.

### Example 1—Sequence Similarity Network Analysis

[0173] Sequence similarity networks (SSN) are multidimensional versions of the more traditional one-dimensional BLAST analysis. In SSN, pairwise sequence relationships among different proteins are visualized. Each protein is illustrated as a “node”, while each node is connected to other nodes by “edges”. Only nodes representing proteins that are similar enough, based on amino acid sequence identity, are connected by edges. Thus, groups of highly similar proteins form clusters in an SSN diagram.

[0174] An SSN for alpha-dioxygenases was created using the EFI web tools (https://efi.igb.illinois.edu/. Remi Zallot, Nils Oberg, and John A. Gerlt, The EFI Web Resource for Genomic Enzymology Tools: Leveraging Protein, Genome, and Metagenome Databases to Discover Novel Enzymes and Metabolic Pathways. Biochemistry 2019 58 (41), 4169-4182. https://doi.org/10.1021/acs.biochem.9b00735). Proteins with more than about 70% sequence identity were grouped together in clusters (see FIG. 1). Representative sequences of different clusters were selected for enzyme expression and kinetic characterization (see TABLE 2). Enzymes that convert multiple or single fatty acids at a higher rate (i.e. higher TON) are preferred in the current application.

[0175] SSNs have been used to identify and describe isofunctional families within enzyme families, e.g. clusters with different substrate specificity, providing an overview of sequence-function space (John A. Gerlt, Genomic enzymology: Web tools for leveraging protein family sequence-function space and genome context to discover novel functions, Biochemistry. Volume 56, 2017, Pages 4293-4308. https://doi.org/10.1021/acs.biochem.7b00614). It stands within reason that enzyme candidates within the same cluster can have similar properties due to the high level of sequence similarity. Thus, in addition to the preferred enzymes, other alpha-dioxygenases within their corresponding clusters are included as part of the current invention. For instance, alpha-dioxygenases with SEQ ID NO 15, 16, 17, 18, 19, 20, 21, 22, 23, 24, 25, 26, 27, 28, 29, 30, 31, 32, 33, 34, 35, 36, 37, 38, 39, 40, 41, 42, 43, 44, 45, 46, 47, 48, 49, 50, 51, 52, 53, 54, 55, 56, 57, and 58 are very similar to SEQ ID NO 1, as their nodes are connected by edges in cluster 5 of the SSN (see FIG. 1) and are therefore included as part of the current invention. Similarly, alpha-dioxygenases with SEQ ID NO 59, 60, 61, 62, 63, 64, 65, 66, 67, 68, 69, and 70 are very similar to SEQ ID NO 2, as their nodes are connected by edges in cluster 14 of the SSN, and are also included as part of the current invention. Alpha-dioxygenases with SEQ ID NO 71, 72, 73, 74, 75, 76, 77, 78, 79, 80, 81, 82, 83, 84, 85, 86, 87, 88, 89, 90, 91, 92, 93, 94, 95, 96, 97, 98, 99, 100, 101, 102, 103, 104, 105, 106, 107, 108, 109, 110, 111, 112, 113, 114, 115, 116, 117, 118, 119, 120, 121, 122, 123, 124, 125, 126, 127, 128, 129, 130, 131, 132, 133, 134, 135, 136, 137, 138, 139, 140, 141, 142, 143, 144, 145, 146, 147, 148, 149, 150, 151, 152, 153, 154, 155, 156, 157, 158, 159, 160, 161, 162, 163, 164, 165, 166, 167, 168, 169, 170, 171, 172, 173, 174, 175, 176, 177, 178, 179, 180, 181, 182, 183, 184, 185, 186, 187, 188, 189, 190, 191, 192, 193, 194, 195, 196, 197, 198, 199, 200, 201, 202, 203, 204, 205, 206, 207, 208, 209, 210, 211, 212, 213, 214, 215, 216, and 217 are very similar to SEQ ID NO: 3, 4, 5, and 6, as their nodes are connected by edges in cluster 1 of the SSN. Finally, alpha-dioxygenases with SEQ ID NO 218, 219, 220, 221, 222, 223, 224, 225, 226, 227, 228, 229, 230, 231, 232, 233, 234, 235, 236, 237, 238, 239, 240, 241, 242, 243, 244, 245, 246, and 247 are very similar to SEQ ID NO: 7, as their nodes are connected by edges in cluster 7 of the SSN.

[0176] Sequence alignment of fatty acid alpha-dioxygenases from clusters 5, 14, and 7 allowed calculating consensus sequences SEQ ID NO 276, 277, and 278, for each cluster, respectively. In embodiments, the cleaning composition comprises one or more fatty acid alpha-dioxygenases comprising a polypeptide sequence selected from the group consisting of: SEQ ID NO: 276, 277, and 278; preferably SEQ ID NO: 276, and 277; and most preferably SEQ ID NO: 276.

### Example 2—Production of Oryza sativa αDOX

[0177] Oryza sativa αDOX (SEQ ID NO: 1) is a fatty acid alpha-dioxygenase that converts fatty acids into the corresponding 2-hydroperoxy fatty acids and is included as an example of the present invention. A codon optimized gene (SEQ ID NO: 248) encoding for an alpha-dioxygenase variant (SEQ ID NO: 249), including an N-terminal amino acid sequence containing a His-tag was designed and synthesized by Genscript. After gene synthesis, the protein was expressed and purified. In brief, the complete synthetic gene sequence was subcloned into a pET30a vector using the NdeI/HindIII cloning sites. For heterologous expression, Escherichia coli BL21 (DE3) cells were transformed with the recombinant plasmid and a single colony was inoculated into LB medium containing kanamycin (50 mg/L). A pre-starter culture was then inoculated into flasks containing Magic Media (Thermo Fisher, Catalog # K6803) supplemented with kanamycin (50 mg/L) and incubated at 16° C. for 72 h. At an OD600 nm=0.5-1.0, 5-aminolevulinic acid (final concentration 0.5 mM) was added. Cells were harvested by centrifugation at 5000 rpm and 4° C. and the pellet was lysed using a bacterial cell lysis buffer (B-PER—Themo Fisher, Waltham, Mass.). After centrifugation, the supernatant was collected, and the protein was purified by one-step purification using HisPur™ Ni-NTA Spin Columns (Thermo Scientific, Catalog #88226) and standard protocols known in the art. The protein was concentrated using a 10 kDa MW cutoff Amicon Ultra centrifugal filter unit (Millipore Sigma, Catalog# UFC901024), followed by desalting using a disposable PD-10 desalting column (GE Healthcare Life Sciences, Catalog#17085101) and a buffer containing 50 mM Tris-HCl, 500 mM NaCl, and 10% Glycerol at pH 8.0. The purified enzyme was stored at −80° C. until use.

### Example 3—Production of Phaeosphaeria nodorum αDOX

[0178] Phaeosphaeria nodorum αDOX (SEQ ID NO: 2) is a fatty acid alpha-dioxygenase that converts fatty acids into the corresponding 2-hydroperoxy fatty acids and is included as an example of the present invention. A codon optimized gene (SEQ ID NO: 250) encoding for an alpha-dioxygenase variant (SEQ ID NO: 251), including an N-terminal amino acid sequence containing a His-tag was designed and synthesized by Genscript. After gene synthesis, the protein was expressed and purified. In brief, the complete synthetic gene sequence was subcloned into a pET30a vector using the NdeI/HindIII cloning sites. For heterologous expression, Escherichia coli BL21 (DE3) cells were transformed with the recombinant plasmid and a single colony was inoculated into LB medium containing kanamycin (50 mg/L). A pre-starter culture was then inoculated into flasks containing Magic Media (Thermo Fisher, Catalog # K6803) supplemented with kanamycin (50 mg/L) and incubated at 16° C. for 72 h. At an OD600 nm=0.5-1.0, 5-aminolevulinic acid (final concentration 0.5 mM) was added. Cells were harvested by centrifugation at 5000 rpm and 4° C. and the pellet was lysed using a bacterial cell lysis buffer (B-PER—Themo Fisher, Waltham, Mass.). After centrifugation, the supernatant was collected, and the protein was purified by one-step purification using HisPur™ Ni-NTA Spin Columns (Thermo Scientific, Catalog #88226) and standard protocols known in the art. The protein was concentrated using a 10 kDa MW cutoff Amicon Ultra centrifugal filter unit (Millipore Sigma, Catalog# UFC901024), followed by desalting using a disposable PD-10 desalting column (GE Healthcare Life Sciences, Catalog#17085101) and a buffer containing 50 mM Tris-HCl, 500 mM NaCl, and 10% Glycerol at pH 8.0. The purified enzyme was stored at −80° C. until use.

### Example 4—Production of Arabidopsis thaliana αDOX

[0179] Arabidopsis thaliana αDOX (SEQ ID NO: 3) is a fatty acid alpha-dioxygenase that converts fatty acids into the corresponding 2-hydroperoxy fatty acids and is included as an example of the present invention. A codon optimized gene (SEQ ID NO: 252) encoding for an alpha-dioxygenase variant was designed and synthesized by Genscript. After synthesis, the gene was cloned into a modified version of pET28a, such as the final plasmid encoded for a αDOX variant including an N-terminal amino acid sequence containing a His-tag, an MBP tag, and a TEV protease cleavage site (SEQ ID NO: 253). For heterologous expression, Escherichia coli BL21 (DE3) cells were transformed with the recombinant plasmid and a single colony was inoculated into LB medium containing kanamycin (50 mg/L). A pre-starter culture was then inoculated into flasks containing TB Media supplemented with kanamycin (50 mg/L) and incubated at 37° C. At an OD600 nm about 4, IPTG (final concentration 0.1 mM) and 5-aminolevulinic acid (final concentration 0.5 mM) were added to the culture and further incubated at 16° C. for 16 h. Cells were harvested by centrifugation and the pellet was lysed. After centrifugation, the supernatant was collected, and the protein was purified by one-step purification using Ni-NTA affinity chromatography and standard protocols known in the art. The protein was stored in 1×PBS buffer containing 10% Glycerol and at pH 7.4. The purified enzyme was stored at −80° C. until use.

### Example 5—Production of Pisum sativum αDOX

[0180] Pisum sativum αDOX (SEQ ID NO: 4) is a fatty acid alpha-dioxygenase that converts fatty acids into the corresponding 2-hydroperoxy fatty acids and is included as an example of the present invention. A codon optimized gene (SEQ ID NO: 254) encoding for an alpha-dioxygenase variant (SEQ ID NO: 255), including an N-terminal amino acid sequence containing a His-tag was designed and synthesized by Genscript. After gene synthesis, the protein was expressed and purified. In brief, the complete synthetic gene sequence was subcloned into a pET30a vector using the NdeI/HindIII cloning sites. For heterologous expression, Escherichia coli BL21 (DE3) cells were transformed with the recombinant plasmid and a single colony was inoculated into LB medium containing kanamycin (50 mg/L). A pre-starter culture was then inoculated into flasks containing Magic Media (Thermo Fisher, Catalog # K6803) supplemented with kanamycin (50 mg/L) and incubated at 16° C. for 72 h. At an OD600 nm=0.5-1.0, 5-aminolevulinic acid (final concentration 0.5 mM) was added. Cells were harvested by centrifugation at 5000 rpm and 4° C. and the pellet was lysed using a bacterial cell lysis buffer (B-PER—Themo Fisher, Waltham, Mass.). After centrifugation, the supernatant was collected, and the protein was purified by one-step purification using HisPur™ Ni-NTA Spin Columns (Thermo Scientific, Catalog #88226) and standard protocols known in the art. The protein was concentrated using a 10 kDa MW cutoff Amicon Ultra centrifugal filter unit (Millipore Sigma, Catalog# UFC901024), followed by desalting using a disposable PD-10 desalting column (GE Healthcare Life Sciences, Catalog#17085101) and a buffer containing 50 mM Tris-HCl, 500 mM NaCl, and 10% Glycerol at pH 8.0. The purified enzyme was stored at −80° C. until use.

### Example 6—Production of Gossypium raimondii αDOX

[0181] Gossypium raimondii αDOX (SEQ ID NO: 5) is a fatty acid alpha-dioxygenase that converts fatty acids into the corresponding 2-hydroperoxy fatty acids and is included as an example of the present invention. A codon optimized gene (SEQ ID NO: 256) encoding for an alpha-dioxygenase variant (SEQ ID NO: 257), including an N-terminal amino acid sequence containing a His-tag was designed and synthesized by Genscript. After gene synthesis, the protein was expressed and purified. In brief, the complete synthetic gene sequence was subcloned into a pET30a vector using the NdeI/HindIII cloning sites. For heterologous expression, Escherichia coli BL21 (DE3) cells were transformed with the recombinant plasmid and a single colony was inoculated into LB medium containing kanamycin (50 mg/L). A pre-starter culture was then inoculated into flasks containing Magic Media (Thermo Fisher, Catalog # K6803) supplemented with kanamycin (50 mg/L) and incubated at 16° C. for 72 h. At an OD600 nm=0.5-1.0, 5-aminolevulinic acid (final concentration 0.5 mM) was added. Cells were harvested by centrifugation at 5000 rpm and 4° C. and the pellet was lysed using a bacterial cell lysis buffer (B-PER—Themo Fisher, Waltham, Mass.). After centrifugation, the supernatant was collected, and the protein was purified by one-step purification using HisPur™ Ni-NTA Spin Columns (Thermo Scientific, Catalog #88226) and standard protocols known in the art. The protein was concentrated using a 10 kDa MW cutoff Amicon Ultra centrifugal filter unit (Millipore Sigma, Catalog# UFC901024), followed by desalting using a disposable PD-10 desalting column (GE Healthcare Life Sciences, Catalog#17085101) and a buffer containing 50 mM Tris-HCl, 500 mM NaCl, and 10% Glycerol at pH 8.0. The purified enzyme was stored at −80° C. until use.

### Example 7—Production of Nicotiana tabacum αDOX

[0182] Nicotiana tabacum αDOX (SEQ ID NO: 6) is a fatty acid alpha-dioxygenase that converts fatty acids into the corresponding 2-hydroperoxy fatty acids and is included as an example of the present invention. A codon optimized gene (SEQ ID NO: 258) encoding for an alpha-dioxygenase variant (SEQ ID NO: 259), including an N-terminal amino acid sequence containing a His-tag was designed and synthesized by Genscript. After gene synthesis, the protein was expressed and purified. In brief, the complete synthetic gene sequence was subcloned into a pET30a vector using the NdeI/HindIII cloning sites. For heterologous expression, Escherichia coli BL21 (DE3) cells were transformed with the recombinant plasmid and a single colony was inoculated into LB medium containing kanamycin (50 mg/L). A pre-starter culture was then inoculated into flasks containing Magic Media (Thermo Fisher, Catalog # K6803) supplemented with kanamycin (50 mg/L) and incubated at 16° C. for 72 h. At an OD600 nm=0.5-1.0, 5-aminolevulinic acid (final concentration 0.5 mM) was added. Cells were harvested by centrifugation at 5000 rpm and 4° C. and the pellet was lysed using a bacterial cell lysis buffer (B-PER—Themo Fisher, Waltham, Mass.). After centrifugation, the supernatant was collected, and the protein was purified by one-step purification using HisPur™ Ni-NTA Spin Columns (Thermo Scientific, Catalog #88226) and standard protocols known in the art. The protein was concentrated using a 10 kDa MW cutoff Amicon Ultra centrifugal filter unit (Millipore Sigma, Catalog# UFC901024), followed by desalting using a disposable PD-10 desalting column (GE Healthcare Life Sciences, Catalog#17085101) and a buffer containing 50 mM Tris-HCl, 500 mM NaCl, and 10% Glycerol at pH 8.0. The purified enzyme was stored at −80° C. until use.

### Example 8—Production of Mycolicibacterium fortuitum αDOX

[0183] Mycolicibacterium fortuitum αDOX (SEQ ID NO: 7) is a fatty acid alpha-dioxygenase that converts fatty acids into the corresponding 2-hydroperoxy fatty acids and is included as an example of the present invention. A codon optimized gene (SEQ ID NO: 260) encoding for an alpha-dioxygenase variant (SEQ ID NO: 261), including an N-terminal amino acid sequence containing a His-tag was designed and synthesized by Genscript. After gene synthesis, the protein was expressed and purified. In brief, the complete synthetic gene sequence was subcloned into a pET30a vector using the NdeI/HindIII cloning sites. For heterologous expression, Escherichia coli BL21 (DE3) cells were transformed with the recombinant plasmid and a single colony was inoculated into LB medium containing kanamycin (50 mg/L). A pre-starter culture was then inoculated into flasks containing Magic Media (Thermo Fisher, Catalog # K6803) supplemented with kanamycin (50 mg/L) and incubated at 16° C. for 72 h. At an OD600 nm=0.5-1.0, 5-aminolevulinic acid (final concentration 0.5 mM) was added. Cells were harvested by centrifugation at 5000 rpm and 4° C. and the pellet was lysed using a bacterial cell lysis buffer (B-PER—Themo Fisher, Waltham, Mass.). After centrifugation, the supernatant was collected, and the protein was purified by one-step purification using HisPur™ Ni-NTA Spin Columns (Thermo Scientific, Catalog #88226) and standard protocols known in the art. The protein was concentrated using a 10 kDa MW cutoff Amicon Ultra centrifugal filter unit (Millipore Sigma, Catalog# UFC901024), followed by desalting using a disposable PD-10 50 mM Tris-HCl, 500 mM NaCl, and 10% Glycerol at pH 8.0. The purified enzyme was stored at −80° C. until use.

### Example 9 (Comparative)—Production of Solanum lycopersicum αDOX

[0184] Solanum lycopersicum αDOX (SEQ ID NO: 8) is a fatty acid alpha-dioxygenase that converts fatty acids into the corresponding 2-hydroperoxy fatty acids and is included as a comparative example of the present invention. A codon optimized gene (SEQ ID NO: 262) encoding for an alpha-dioxygenase variant (SEQ ID NO: 263), including an N-terminal amino acid sequence containing a His-tag was designed and synthesized by Genscript. After gene synthesis, the protein was expressed and purified. In brief, the complete synthetic gene sequence was subcloned into a pET30a vector using the NdeI/HindIII cloning sites. For heterologous expression, Escherichia coli BL21 (DE3) cells were transformed with the recombinant plasmid and a single colony was inoculated into LB medium containing kanamycin (50 mg/L). A pre-starter culture was then inoculated into flasks containing Magic Media (Thermo Fisher, Catalog # K6803) supplemented with kanamycin (50 mg/L) and incubated at 16° C. for 72 h. At an OD600 nm=0.5-1.0, 5-aminolevulinic acid (final concentration 0.5 mM) was added. Cells were harvested by centrifugation at 5000 rpm and 4° C. and the pellet was lysed using a bacterial cell lysis buffer (B-PER—Themo Fisher, Waltham, Mass.). After centrifugation, the supernatant was collected, and the protein was purified by one-step purification using HisPur™ Ni-NTA Spin Columns (Thermo Scientific, Catalog #88226) and standard protocols known in the art. The protein was concentrated using a 10 kDa MW cutoff Amicon Ultra centrifugal filter unit (Millipore Sigma, Catalog# UFC901024), followed by desalting using a disposable PD-10 desalting column (GE Healthcare Life Sciences, Catalog#17085101) and a buffer containing 50 mM Tris-HCl, 500 mM NaCl, and 10% Glycerol at pH 8.0. The purified enzyme was stored at −80° C. until use.

### Example 10 (Comparative)—Production of Medicago truncatula αDOX

[0185] Medicago truncatula αDOX (SEQ ID NO: 9) is a fatty acid alpha-dioxygenase that converts fatty acids into the corresponding 2-hydroperoxy fatty acids and is included as a comparative example of the present invention. A codon optimized gene (SEQ ID NO: 264) encoding for an alpha-dioxygenase variant (SEQ ID NO: 265), including an N-terminal amino acid sequence containing a His-tag was designed and synthesized by Genscript. After gene synthesis, the protein was expressed and purified. In brief, the complete synthetic gene sequence was subcloned into a pET30a vector using the NdeI/HindIII cloning sites. For heterologous expression, Escherichia coli BL21 (DE3) cells were transformed with the recombinant plasmid and a single colony was inoculated into LB medium containing kanamycin (50 mg/L). A pre-starter culture was then inoculated into flasks containing Magic Media (Thermo Fisher, Catalog # K6803) supplemented with kanamycin (50 mg/L) and incubated at 16° C. for 72 h. At an OD600 nm=0.5-1.0, 5-aminolevulinic acid (final concentration 0.5 mM) was added. Cells were harvested by centrifugation at 5000 rpm and 4° C. and the pellet was lysed using a bacterial cell lysis buffer (B-PER—Themo Fisher, Waltham, Mass.). After centrifugation, the supernatant was collected, and the protein was purified by one-step purification using HisPur™ Ni-NTA Spin Columns (Thermo Scientific, Catalog #88226) and standard protocols known in the art. The protein was concentrated using a 10 kDa MW cutoff Amicon Ultra centrifugal filter unit (Millipore Sigma, Catalog# UFC901024), followed by desalting using a disposable PD-10 desalting column (GE Healthcare Life Sciences, Catalog#17085101) and a buffer containing 50 mM Tris-HCl, 500 mM NaCl, and 10% Glycerol at pH 8.0. The purified enzyme was stored at −80° C. until use.

### Example 11 (Comparative)—Production of Arabidopsis thaliana αDOX

[0186] Arabidopsis thaliana αDOX (SEQ ID NO: 10) is a fatty acid alpha-dioxygenase that converts fatty acids into the corresponding 2-hydroperoxy fatty acids and is included as a comparative example of the present invention. A codon optimized gene (SEQ ID NO: 266) encoding for an alpha-dioxygenase variant was designed and synthesized by Genscript. After synthesis, the gene was cloned into a modified version of pET28a, such as the final plasmid encoded for a αDOX variant including an N-terminal amino acid sequence containing a His-tag, an MBP tag, and a TEV protease cleavage site (SEQ ID NO: 267). For heterologous expression, Escherichia coli BL21 (DE3) cells were transformed with the recombinant plasmid and a single colony was inoculated into LB medium containing kanamycin (50 mg/L). A pre-starter culture was then inoculated into flasks containing TB Media supplemented with kanamycin (50 mg/L) and incubated at 37° C. At an OD600 nm about 3.8, IPTG (final concentration 0.1 mM) and 5-aminolevulinic acid (final concentration 0.25 mM) were added to the culture and further incubated at 16° C. for 16 h. Cells were harvested by centrifugation and the pellet was lysed. After centrifugation, the supernatant was collected, and the protein was purified by one-step purification using Ni-NTA affinity chromatography and standard protocols known in the art. The protein was stored in 1×PBS buffer containing 10% Glycerol and at pH 7.4. The purified enzyme was stored at −80° C. until use.

### Example 12 (Comparative)—Production of Citrus sinensis αDOX

[0187] Citrus sinensis αDOX (SEQ ID NO: 11) is a fatty acid alpha-dioxygenase that converts fatty acids into the corresponding 2-hydroperoxy fatty acids and is included as a comparative example of the present invention. A codon optimized gene (SEQ ID NO: 268) encoding for an alpha-dioxygenase variant (SEQ ID NO: 269), including an N-terminal amino acid sequence containing a His-tag was designed and synthesized by Genscript. After gene synthesis, the protein was expressed and purified. In brief, the complete synthetic gene sequence was subcloned into a pET30a vector using the NdeI/HindIII cloning sites. For heterologous expression, Escherichia coli BL21 (DE3) cells were transformed with the recombinant plasmid and a single colony was inoculated into LB medium containing kanamycin (50 mg/L). A pre-starter culture was then inoculated into flasks containing Magic Media (Thermo Fisher, Catalog # K6803) supplemented with kanamycin (50 mg/L) and incubated at 16° C. for 72 h. At an OD600 nm=0.5-1.0, 5-aminolevulinic acid (final concentration 0.5 mM) was added. Cells were harvested by centrifugation at 5000 rpm and 4° C. and the pellet was lysed using a bacterial cell lysis buffer (B-PER—Themo Fisher, Waltham, Mass.). After centrifugation, the supernatant was collected, and the protein was purified by one-step purification using HisPur™ Ni-NTA Spin Columns (Thermo Scientific, Catalog #88226) and standard protocols known in the art. The protein was concentrated using a 10 kDa MW cutoff Amicon Ultra centrifugal filter unit (Millipore Sigma, Catalog# UFC901024), followed by desalting using a disposable PD-10 desalting column (GE Healthcare Life Sciences, Catalog#17085101) and a buffer containing 50 mM Tris-HCl, 500 mM NaCl, and 10% Glycerol at pH 8.0. The purified enzyme was stored at −80° C. until use.

### Example 13 (Comparative)—Production of Pseudomonas alcaligenes αDOX

[0188] Pseudomonas alcaligenes αDOX (SEQ ID NO: 12) is a fatty acid alpha-dioxygenase that converts fatty acids into the corresponding 2-hydroperoxy fatty acids and is included as a comparative example of the present invention. A codon optimized gene (SEQ ID NO: 270) encoding for an alpha-dioxygenase variant (SEQ ID NO: 271), including an N-terminal amino acid sequence containing a His-tag was designed and synthesized by Genscript. After gene synthesis, the protein was expressed and purified. In brief, the complete synthetic gene sequence was subcloned into a pET30a vector using the NdeI/HindIII cloning sites. For heterologous expression, Escherichia coli BL21 (DE3) cells were transformed with the recombinant plasmid and a single colony was inoculated into LB medium containing kanamycin (50 mg/L). A pre-starter culture was then inoculated into flasks containing Magic Media (Thermo Fisher, Catalog # K6803) supplemented with kanamycin (50 mg/L) and incubated at 16° C. for 72 h. At an OD600 nm=0.5-1.0, 5-aminolevulinic acid (final concentration 0.5 mM) was added. Cells were harvested by centrifugation at 5000 rpm and 4° C. and the pellet was lysed using a bacterial cell lysis buffer (B-PER—Themo Fisher, Waltham, Mass.). After centrifugation, the supernatant was collected, and the protein was purified by one-step purification using HisPur™ Ni-NTA Spin Columns (Thermo Scientific, Catalog #88226) and standard protocols known in the art. The protein was concentrated using a 10 kDa MW cutoff Amicon Ultra centrifugal filter unit (Millipore Sigma, Catalog# UFC901024), followed by desalting using a disposable PD-10 desalting column (GE Healthcare Life Sciences, Catalog#17085101) and a buffer containing 50 mM Tris-HCl, 500 mM NaCl, and 10% Glycerol at pH 8.0. The purified enzyme was stored at −80° C. until use.

### Example 14 (Comparative)—Production of Streptomyces avermitilis αDOX

[0189] Streptomyces avermitilis αDOX (SEQ ID NO: 13) is a fatty acid alpha-dioxygenase that converts fatty acids into the corresponding 2-hydroperoxy fatty acids and is included as a comparative example of the present invention. A codon optimized gene (SEQ ID NO: 272) encoding for an alpha-dioxygenase variant (SEQ ID NO: 273), including an N-terminal amino acid sequence containing a His-tag was designed and synthesized by Genscript. After gene synthesis, the protein was expressed and purified. In brief, the complete synthetic gene sequence was subcloned into a pET30a vector using the NdeI/HindIII cloning sites. For heterologous expression, Escherichia coli BL21 (DE3) cells were transformed with the recombinant plasmid and a single colony was inoculated into LB medium containing kanamycin (50 mg/L). A pre-starter culture was then inoculated into flasks containing Magic Media (Thermo Fisher, Catalog # K6803) supplemented with kanamycin (50 mg/L) and incubated at 16° C. for 72 h. At an OD600 nm=0.5-1.0, 5-aminolevulinic acid (final concentration 0.5 mM) was added. Cells were harvested by centrifugation at 5000 rpm and 4° C. and the pellet was lysed using a bacterial cell lysis buffer (B-PER—Themo Fisher, Waltham, Mass.). After centrifugation, the supernatant was collected, and the protein was purified by one-step purification using HisPur™ Ni-NTA Spin Columns (Thermo Scientific, Catalog #88226) and standard protocols known in the art. The protein was concentrated using a 10 kDa MW cutoff Amicon Ultra centrifugal filter unit (Millipore Sigma, Catalog# UFC901024), followed by desalting using a disposable PD-10 desalting column (GE Healthcare Life Sciences, Catalog#17085101) and a buffer containing 50 mM Tris-HCl, 500 mM NaCl, and 10% Glycerol at pH 8.0. The purified enzyme was stored at −80° C. until use.

### Example 15 (Comparative)—Production of Mycolicibacterium fortuitum αDOX

[0190] Mycolicibacterium fortuitum αDOX (SEQ ID NO: 14) is a fatty acid alpha-dioxygenase that converts fatty acids into the corresponding 2-hydroperoxy fatty acids and is included as a comparative example of the present invention. A codon optimized gene (SEQ ID NO: 274) encoding for an alpha-dioxygenase variant (SEQ ID NO: 275), including an N-terminal amino acid sequence containing a His-tag was designed and synthesized by Genscript. After gene synthesis, the protein was expressed and purified. In brief, the complete synthetic gene sequence was subcloned into a pET30a vector using the NdeI/HindIII cloning sites. For heterologous expression, Escherichia coli BL21 (DE3) cells were transformed with the recombinant plasmid and a single colony was inoculated into LB medium containing kanamycin (50 mg/L). A pre-starter culture was then inoculated into flasks containing Magic Media (Thermo Fisher, Catalog # K6803) supplemented with kanamycin (50 mg/L) and incubated at 16° C. for 72 h. At an OD600 nm=0.5-1.0, 5-aminolevulinic acid (final concentration 0.5 mM) was added. Cells were harvested by centrifugation at 5000 rpm and 4° C. and the pellet was lysed using a bacterial cell lysis buffer (B-PER—Themo Fisher, Waltham, Mass.). After centrifugation, the supernatant was collected, and the protein was purified by one-step purification using HisPur™ Ni-NTA Spin Columns (Thermo Scientific, Catalog #88226) and standard protocols known in the art. The protein was concentrated using a 10 kDa MW cutoff Amicon Ultra centrifugal filter unit (Millipore Sigma, Catalog# UFC901024), followed by desalting using a disposable PD-10 desalting column (GE Healthcare Life Sciences, Catalog#17085101) and a buffer containing 50 mM Tris-HCl, 500 mM NaCl, and 10% Glycerol at pH 8.0. The purified enzyme was stored at −80° C. until use.

### Example 16—Enzyme Activity Assays

[0191] Reactions with alpha-dioxygenases were performed as follows. An aliquot of fatty acid in ethanol (final concentration 100 μM) was resuspended in buffer (50 mM HEPES at pH 9.0) in a scintillation vial. The reaction was started by addition of enzyme (final concentration 6 ppm). The reaction was incubated for up to 10 minutes at 37° C. with 200 rpm agitation and the conversion was monitored using an oxygen sensor. The TON (in s-1) were calculated as the ratio between the initial rate of oxygen consumption (in μM/s) and the concentration of enzyme (in μM). The results are summarized in TABLE 2. Aliquots of 100 μL of the reaction solutions were collected and mixed with 900 μL of isopropyl alcohol to stop the reactions. Analysis of the samples was performed by reversed-phase LC/MS/MS to confirm the conversion of the fatty acids.

TABLE 2
TON of Fatty Acids by Different Alpha-Dioxygenases.

| | | | | Palmitic | Stearic | Oleic |
|---|---|---|---|---|---|---|
| | | | | Acid, | Acid, | Acid, |
| | SEQ | SSN | Accession | TON | TON | TON |
| Example | ID | Cluster | Number | [s⁻¹] | [s⁻¹] | [s⁻¹] |
| 2 | 1 | 5 | Q9M5J1 | 20.58 | 8.02 | 5.54 |
| 3 | 2 | 14 | Q0URU2 | 20.63 | 8.80 | 0.99 |
| 4 | 3 | 1 | Q9SGH6 | 1.01 | 0.47 | 0.14 |
| 5 | 4 | 1 | Q5GQ66 | 1.92 | 0.80 | 1.40 |
| 6 | 5 | 1 | A0A0D2W0W0 | 2.56 | 1.68 | 1.68 |
| 7 | 6 | 1 | O82031 | 3.07 | 2.66 | 0.78 |
| 8 | 7 | 7 | K0VMX8 | 0.00 | 1.66 | 0.00 |
| 9* | 8 | 3 | Q5WM33 | 0.00 | 0.12 | 0.00 |
| 10* | 9 | 3 | A4PRI0 | 0.57 | 0.02 | 0.06 |
| 11* | 10 | 3 | Q9C9U3 | 0.54 | 0.13 | 0.13 |
| 12* | 11 | 3 | A0A067FHE4 | 0.29 | 0.00 | 0.00 |
| 13* | 12 | 15 | U3BA19 | 0.36 | 0.21 | 0.00 |
| 14* | 13 | 16 | Q82M86 | 0.00 | 0.10 | 0.00 |
| 15* | 14 | 8 | K0VM18 | 0.21 | 0.03 | 0.00 |

*Comparative examples

### Example 17—Exemplary Manual Dish-Washing Detergent Compositions

[0192] Manual dish-washing detergent compositions comprising fatty acids alpha-dioxygenases (SEQ ID NO: 1 or 2) according to the invention are shown in TABLE 3. The enzymes can be produced following the protocols described in Examples 2 and 3 or similar procedures described in the art.

TABLE 3
Detergent Compositions

| Ingredient | Wt % | Wt % |
|---|---|---|
| Sodium alkyl ethoxy sulfate (C1213EO0.6S) | 22.91% | 22.91% |
| n-C12-14 Di Methyl Amine Oxide | 7.64% | 7.64% |
| Lutensol ® XP80 (non-ionic surfactant | 0.45% | 0.45% |
| supplied by BASF) | | |
| Sodium Chloride | 1.2% | 1.2% |
| Poly Propylene Glycol (MW 2000) | 1% | 1% |
| Ethanol | 2% | 2% |
| Sodium Hydroxide | 0.24% | 0.24% |
| Oryza sativa αDOX (SEQ ID NO: 1) | 0.1% | 0.0% |
| Phaeosphaeria nodorum | 0.0% | 0.1% |
| αDOX (SEQ ID NO: 2) | | |
| Minors (perfume, preservative, dye) + water | To 100% | To 100% |
| pH (@ 10% solution) | 9 | 9 |

### Example 18—Automatic Dishwashing Compositions

[0193] The following, as shown in TABLE 4, are non-limited examples of cleaning compositions of the present invention in the form of automatic dishwashing compositions. The amounts of the ingredients are listed as weight percentage.

TABLE 4

| Ingredients | EX 18 | EX 19 | EX 20 | EX 21 | EX 22 |
|---|---|---|---|---|---|
| Sodium | 8.0 | 7.4 | 4.0 | 3.5 | 0 |
| carbonate | | | | | |
| Sodium sulphate | 5.0 | 2.8 | 1 | 5.0 | 5.0 |
| Sodium silicate | 0.2 | 0.2 | 0 | 0.1 | 0.3 |
| MGDA | 1.5 | 2.5 | 5.0 | 2.5 | 5.0 |
| Sodium | 1.0 | 1.0 | 2.0 | 1.0 | 2.0 |
| percarbonate | | | | | |
| Sulfonated | 0.25 | 0.4 | 1.2 | 0.5 | 0.5 |
| polymer | | | | | |
| Protease | 0.025 | 0.035 | 0.035 | 0.25 | 0.035 |
| Amylase | 0.0017 | 0.0055 | 0.009 | 0.005 | 0.002 |
| Oryza sativa | 0.1 | 0.1 | 0.1 | 0.1 | 0.001 |
| αDOX (SEQ ID | | | | | |
| NO: 1) | | | | | |
| Bleach Activator | 0.001 | 0.001 | 0.002 | 0.002 | 0.002 |
| SLF180 | 0.5 | 0.5 | 0.75 | 0.5 | 0.75 |
| Lutensol TO7 | 0.5 | 0.5 | 0.9 | 0.9 | 0.5 |
| Liquid polymer | 0.5 | 0.5 | 0 | 0.5 | 0 |
| Miscellaneous | balance | balance | balance | balance | balance |
| | to 18 g | to 18 g | to 18 g | to 18 g | to 18 g |

[0194] Wherein values in the table above are given as gram of active material.

| | |
|---|---|
| Amylase | Stainzyme plus ® supplied by Novozymes |
| Bleach Activator | PAAN by Weylchem |
| Lutensol TO7 | Nonionic surfactant supplied by BASF |
| Liquid polymer | GT 101 supplied by Nippon Shokubi |
| MGDA | Three-sodium Methyl glycine diacetate |
| | supplied by BASF |
| Protease | Ultimase ® supplied by DuPont |
| Sulfonated polymer | Acusol 588 supplied by Dow Chemicals |
| SLF180 | Nonionic surfactant supplied by BASF |

### Example 19—Shampoo Compositions

[0195] The following, as shown in TABLES 5 and 6, are non-limited examples of cleaning compositions of the present invention in the form of shampoo compositions for cleaning hair. The amounts of the ingredients are listed as weight percentage.

TABLE 5

| Ingredients | EX 23 | EX 24 |
|---|---|---|
| Water Purified | Q.S to 100 | Q.S to 100 |
| Sodium Laureth-3 Sulfate | 21.6 | 21.6 |
| Sodium Lauryl Sulfate | 34.5 | 34.5 |
| Laureth-4 | 0.9 | 0.9 |
| Dimethicone 330M cps | 0.5 | 0.5 |
| Glycol Distearate | 1.5 | 1.5 |
| Polyquaternium-6 | 0.32 | 0.32 |
| Oryza sativa αDOX (SEQ ID NO: 1) | 0.1 | 0.001 |
| Sodium Benzoate | 0.27 | 0.27 |
| Citric acid 50% Solution | 0.52 | 0.52 |
| Methylchloroisothiazolinone/ | 0.035 | 0.035 |
| methylisothiazolinone | | |
| Sodium chloride | 1.66 | 1.66 |
| Fragrance | 0.65 | 0.65 |
| DL-Panthenol 56% solution | 0.05 | 0.05 |
| Panthenyl Ethyl ether | 0.03 | 0.03 |

TABLE 6

| Ingredient | EX 25 | EX 26 | EX 27 | EX 28 | EX 29 | EX 30 | EX 31 |
|---|---|---|---|---|---|---|---|
| Sodium lauryl ether sulfate | | 6 | 10 | 6 | 6 | 9 | |
| (SLE3S) | | | | | | | |
| Sodium cocoyl isethionate | | | | | | | 8.5 |
| Sodium lauryl sulfate (SLS) | 1.5 | 7 | 1.5 | 7 | 7 | 6 | |
| Sodium lauryl ether sulfate | 10.5 | | | | | | |
| (SLE1S) | | | | | | | |
| Disodium laureth | | | | | | | 8.5 |
| sulfosuccinate | | | | | | | |
| Sodium lauryl sulfoacetate | | | | | | | 2.5 |
| Sodium Lauroyl Sarcosinate | | | | | | | 0.75 |
| Cocoamidopropyl | | | | | | | 1.5 |
| Hydroxysultaine | | | | | | | |
| Cocoamidopropyl Betaine | 1 | 2 | 2 | 2 | 2 | 2 | 2 |
| Coconut monoethanol | | 0.85 | | 0.85 | | | |
| amide (CMEA) | | | | | | | |
| Cetyl alcohol | | | 1 | | | | |
| Stearyl alcohol | | | 2 | | | | |
| Dimethicone | 1 | 1 | 1 | 1 | 1 | | 0.5 |
| Ethylene glycol distearate | 1.5 | 1.5 | 1.5 | 1.5 | 1.5 | | |
| (EGDS) | | | | | | | |
| Jaguar ® C500¹ | 0.25 | 0.25 | 0.15 | | | | |
| Synthetic Cationic Polymer | | | | 0.1 | | | |
| AMT² | | | | | | | |
| Polydiallyldimethylammonium | | | | | 0.1 | | |
| chloride (DADMAC) | | | | | | | |
| Oryza sativa αDOX (SEQ | 0.01 | 0.1 | 0.001 | 0.01 | 0.001 | 0.1 | 0.01 |
| ID NO: 1) | | | | | | | |
| Excel Guar³ | | | | | | 0.1 | .15 |
| pH | 6 | 6 | 6 | 6 | 6 | 6 | |
| Water-USP Purified & | Q.S. to | Q.S. to | Q.S. to | Q.S. to | Q.S. to | Q.S. to | Q.S. to |
| Minors | 100 | 100 | 100 | 100 | 100 | 100 | 100 |

¹Cationic polymer derived from a natural gum with low aqueous viscosity
²Cationic synthetic copolymer
³Cationic plant derived polymer

[0196] All percentages and ratios given for enzymes are based on active protein. All percentages and ratios herein are calculated by weight unless otherwise indicated. All percentages and ratios are calculated based on the total composition unless otherwise indicated.

[0197] It should be understood that every maximum numerical limitation given throughout this specification includes every lower numerical limitation, as if such lower numerical limitations were expressly written herein. Every minimum numerical limitation given throughout this specification will include every higher numerical limitation, as if such higher numerical limitations were expressly written herein. Every numerical range given throughout this specification will include every narrower numerical range that falls within such broader numerical range, as if such narrower numerical ranges were all expressly written herein.

[0198] The dimensions and values disclosed herein are not to be understood as being strictly limited to the exact numerical values recited. Instead, unless otherwise specified, each such dimension is intended to mean both the recited value and a functionally equivalent range surrounding that value. For example, a dimension disclosed as “40 mm” is intended to mean “about 40 mm.”

[0199] Every document cited herein, including any cross referenced or related patent or application and any patent application or patent to which this application claims priority or benefit thereof, is hereby incorporated herein by reference in its entirety unless expressly excluded or otherwise limited. The citation of any document is not an admission that it is prior art with respect to any invention disclosed or claimed herein or that it alone, or in any combination with any other reference or references, teaches, suggests or discloses any such invention. Further, to the extent that any meaning or definition of a term in this document conflicts with any meaning or definition of the same term in a document incorporated by reference, the meaning or definition assigned to that term in this document shall govern.

[0200] While particular embodiments of the present invention have been illustrated and described, it would be obvious to those skilled in the art that various other changes and modifications can be made without departing from the spirit and scope of the invention. It is therefore intended to cover in the appended claims all such changes and modifications that are within the scope of this invention.

The application's sequence listing, which the Patent Office published only in electronic form, follows.

SEQUENCE LISTING (278 sequences)

SEQ ID NO: 1 - protein, 618 aa, Oryza sativa
MGSGLFKPRVHPDLRDVFSKMSFFDKIGFLFIHAFDKRNLWHKVPVPIGLLYLNTRRTLLEKYNLLAVGRSSHGALFDPKEFLYRTEDGKYNDPHNAEAGSQNTFFGRNMEPVDQQDELMSPDPFVVATKLLARREYKDTGKQFNILAAAWIQFMVHDWMDHMEDTGQIGITAPKEVANECPLKSFKFHPTKELPTNSDGIKIGHYNIRTAWWDGSAVYGNNEERAEKLRTYVDGKLVIGDDGLLLHKENGVALSGDIRNSWAGVSILQALFVKEHNAVCDAIKEEHPNLSDEELYRYAKLVTSAVIAKVHTIDWTVELLKTKTMRAAMRANWYGLLGKKIKDTFGHIGGPILGGLVGLKKPNNHGVPYSLTEEFTSVYRMHSLIPSTLKLRDPTGQPDANNSPPCLEDIDIGEMIGLKGEEQLSKIGFEKQALSMGYQACGALELWNYPSFFRNLIPQNLDGTNRSDRIDLAALEVYRDRERSVPRYNEFRRRLFLIPIKSWEDLTSDKDAIETIRAIYGDDVEKLDLLVGLMAEKKIKGFAISETAFNIFILMASRRLEADRFFTSNFNEETYTKKGMQWVKTTEGLRDVINRHYPEITAKWMKSSSAFSVWDADY

SEQ ID NO: 2 - protein, 605 aa, Phaeosphaeria nodorum
MSTPSKSEPYNYTPSLPQRALVFVYKGINKIIPWHKLPTYIGVLNLSAYRYELRSKNLHDVYPSREDQGTRGCPAITDEQFLHTRHSDGLFNDLEASKMGCVGMRFGRNVAREHTARPSHEELMTPNPRLISEQLLKRDKFKPATSLNLLAAAWIQLVQQHRVPLPAGDAWNSPDGKMKIDATQDDEPLDQTDNTSPAYKNINTHWWDGSQIYGSSEAHTTGLRLGATNGKLLVDEQKFATFLPRDANCIPQTGFNTNWWLGLEILHTLFVLEHNAICDALHISYPDWTSEKLFDTARLVNCALMAKIHTTEWTPAILAHPALEISMNANWWGILGERLYKLLGRVSKTSEALSGIPGSTVEHHAAPYSLTEEFVSVYRMHSLIPDSIAFFSASNGAHKQTYPIQSVAFEHTRTPFEKSNLSFADIFYSFGINYPGAITLNNMPHFLKDLHTPDGRHIDLGTIDILRDRERGVPRYNQFRRLFHMPAQPSFLAITGGNKVVADKLAKLYNDDIETVDLLIGCLAEPLPKGFGFSDTAFRVFILMASRRLKSDRFIAGDWNTETYSEVGMKWVQGNVMKDVLGRHFPELKGVLGGSGNGKYTSYFE

SEQ ID NO: 3 - protein, 639 aa, Arabidopsis thaliana
MKVITSLISSILLKFIHKDFHEIYARMSLLDRFLLLIVHGVDKMVPWHKLPVFLGLTYLEVRRHLHQQYNLLNVGQTPTGIRFDPANYPYRTADGKFNDPFNEGVGSQNSFFGRNCPPVDQKSKLRRPDPMVVATKLLGRKKFIDTGKQFNMIAASWIQFMIHDWIDHLEDTHQIELVAPKEVASKCPLSSFRFLKTKEVPTGFFEIKTGSQNIRTPWWDSSVIYGSNSKTLDRVRTYKDGKLKISEETGLLLHDEDGLAISGDIRNSWAGVSALQALFIKEHNAVCDALKDEDDDLEDEDLYRYARLVTSAVVAKIHTIDWTVQLLKTDTLLAGMRANWYGLLGKKFKDSFGHAGSSILGGVVGMKKPQNHGVPYSLTEDFTSVYRMHSLLPDQLHILDIDDVPGTNKSLPLIQEISMRDLIGRKGEETMSHIGFTKLMVSMGHQASGALELMNYPMWLRDIVPHDPNGQARPDHVDLAALEIYRDRERSVPRYNEFRRSMFMIPITKWEDLTEDEEAIEVLDDVYDGDVEELDLLVGLMAEKKIKGFAISETAFYIFLIMATRRLEADRFFTSDFNETIYTKKGLEWVNTTESLKDVIDRHYPDMTDKWMNSESAFSVWDSPPLTKNPIPLYLRIPS

SEQ ID NO: 4 - protein, 643 aa, Pisum sativum
MWSIVTDPIKDLISKVVKNSIHPDFHDAVSKMTIIDAFLFFIVHSIDKLGIWHRLPVFFGLLYLAIRRHLHQEYNLLNVGTTPVGIRSNPSDFPYRTADGRYNDPFNDGAGSQGSFFGRNILPVDQKNKLLKPDPMVVVTKLLERKTYKDTGTQFNVIAASWIQFMIHDWIDHMEDTKQVELSAPSEVASQCPLKSFKFFKTKEIPTGFYDIKTGHANVRTPWWDGSVVYGSNEQVLNKVRTFKDGKLKISKEGHLLHNEDGTAISGDIRNSWAGVTTLQTLFVQEHNAVCDALKKENSDLEDEDLYRHARLVTSAVIAKIHTIDWTVELLKTDTLLAGMRANWYGLLGKQFKDRFGHVGNSILSGFVGMKRSENHGVPYSLTEEFATVYRMHPLLPDSLHLRDISASPGPNKSPPLIKEIPMNDLIGLQGEKTLLEIGNAKKLVSMGHQACGALELWNYPSWLRNLVPHNIDGTERSDHVDLAALEVYRDRERNVARYNQFRRGLLLIPISKWEDLTDDEEAIKVLEEVYGDDVEELDVLVGLMAEKKIKGFAISETAFVIFLLMASRRLEADRFFTSNFNEETYTKKGLEWVNTTESLKDVIDRHHPEMTHKWLNSSSAFSVWDTSPNKHNHIPIYFRVPN

SEQ ID NO: 5 - protein, 641 aa, Gossypium raimondii
MAFITKALFNNILRRFIHQDFHEAVSSMTIIDAFLFLMVHSVDRLGIWHRLPVVLGLIYLAVRRHLHQQYNLINVGETPSGVRFSPGDYPYRTADGSYNDPFNEGAGSQGSFFGRNIMPVHQTDKLMKPDPMVVATKLLTRTQYKDTDKQFNMIAASWIQFMIHDWIDHMENTNQQVEFIAPKEVANKCPLSSFKFYPTKEFPTGFYNIKSGAKNIRTPWWDGSVIYGSNKERLQKVRTFTDGKLKISEDGLLQQDEDGIPISGDIRNSWAGISTLQALFIKEHNAVCDTLKKEYPDLNDEELYRYARLVTSAVIAKIHTIDWTVELLKTDMLLAGMRANWYGLLGKKFKDTFGHVGGSSLGGLVGLRKPVNHGVPYSLTEEFTSVYRLHQLLPDSIHLRNINVAPGPNKSPPLLEEVPMPDLIGHKGEKTLSQIGFTRQFVSMGHQACGALELWNYPSWLRDLVAQDVDGKDRPDHVDLAALEIYRDRERKVARYNQFRRALLLIPISKWEDLTEDKNAIEVLKDVYGDDVEELDLMVGLMAEKKIKGFAISETAFIVFLLMATRRLEADRFFTSDFNEETYTKKGFEWVNTTESLKDVLDRHYPEISKKWMNSTSAFSVWDSPPNAPNPIPLYLRFPSS

SEQ ID NO: 6 - protein, 643 aa, Nicotiana tabacum
MSLVMDSLKNLLLSPLRGFIHKDLHDIFERMTLLSKLLFLIVHLVDKLNLWHRLPVLLGLLYLGARRHLHQEYNLINVGKTPIGVRSNPADHPYRTADGKYNDPFNEGAGSELSFFGRNMLPVDQHNQLKKPDPMVVATKLLARRNFVDTGKQFNMIAASWIQFMIHDWIDHLEDTKQIELKAAEEVASQCPLKSFRFFKTKEIPTGFYEIKTGHLNTRTPWWDGSAIYGSNAEVLKKVRTFKDGKLKLSADGLLEIDKNGKIISGDVRNTWAGLSALQALFVQEHNSVCDALKKEYPELEEEDLYRHARLVTSAVIAKVHTIDWTVELLKTDTLLAGMRANWYGLLGKKFKDTFGHVGGSILGGFVGMKKPENYGVPYSLTEEFTSVYRMHQLLPDKLQLRNIDATPGPNKSLPLTNEIPLEDLIGGKGEKNLSKIGFTKQMVSMGHQACGALELWNYPVWMRDLIPQDVDGTDRPDHIDLAALEIYRDRERSVARYNEFRRGMLQIPISKWEDLTDDEEVINTLGEVYGDDVEELDLMVGMAAEKKIKGFAISETAFFIFLVMASRRLEADRFFTSNYNEETYTKKGLEWVNTTESLKDVLDRHYPEITEKWMNSSSAFSVWDSTPQPHNPIPLYFRVPPQ

SEQ ID NO: 7 - protein, 592 aa, Mycolicibacterium fortuitum
MPKPSLLMRLFLTTTELIDRRIGWDKLPPVLGVAVLVGIRDALREHNLYDTCQGAPPEADPLPPSDYLTVRTANGSYNDLSAPSMGMANTRFGRNVPLTEGRSEQLPELMDPNPRLISTKLLQRRAFRPATTLNVLAAAWLQFETRDWFSHGSDPNRMLEIPRPPDDDWPEDTIKVPATAVDPTAEPGGSTFLNTETHWWDGSQIYGSNQQFQDAIRTHHDGKVCIDADGFIDIPPTLIGAAGGADGWWLGMELMGTIFMREHNAICDRLKAAYPNWNDDQLFNKARLINAALIAKIHTIEWTPAILGHPTLQIGMRANWFGLAGERVKELFGRLSAGDLLSGIPGSNTDHHTAPYSITEDFVTVYRMHPLVPDDYELLSLTSGIEPRALTFSDIHGGANSRGVLKSQGVAECLYSLGVAHPGAVTLHNSPTFMRDFERVDEHALDMIATDILRSRERGVPRYNDFRRALRLAPATSFDEISGGDAATAAVMAEIYGGDIEKVDTMVGMFGEKLPEGFGFSDTAFRIFVLMASRRLKSDRFYTVDFTPRVYTPEGMDWIDRNDMVSVLLRHYPELEPALRGQRNAFAPWRRL

SEQ ID NO: 8 - protein, 632 aa, Solanum lycopersicum
MAFSISLPDFVHPQLRHVVAKMSFFDTILFYVVHLVDKFDLWHRLPVLLGAAYLGIRRHLHQRYNLLHVGKVNGKKYDTEEFTYRTADGSCNHPVDHLVGSQGTFFGRNMLPSTSSYALLEPHPVTVASKLLERRKYTDCGGQFNMIACAWLQFMIHDWNDHMEDTEQVELRAPQDVAAGCPLKSFKFLKTKKLPTGSPDLKFGHLNSRTPWWDGSVIYGNNEEGMIRVRRFKDGKLRLSGDGLLEHDDKGIPISGDVRNYWAGYSLLQALFVKEHNAICDMLKEHYPEFDDEKVYRHARLITSAVIAKIHTIDWTLEIVKTDTLMAGMRINWYGLLGKRVKDLLGPKFGPVLSGLVGLKKPRDHGTPYSLTEEFVSVYRMHSLLPDTIVLRDLKSTTSEDKSLPIQDEIPMREMIGKEGEKNLSKIGMEQMLVSMGHQSSGAGTLWNFPSWMRNLVPHDIDGDDRPDSIDMAALDIYRDRERGVPRYNEFRRNLLMVPISKWEDLTNDEEVIEALQEVYGDDIEKLDLQIGLHAEKKIKGFAISETAFFIFLLIASRRLEADRFFTTDFNSRTYTEKGFEWVNKTETLKDVIDRYFPEMTEKYMRCTSAFSVWSSDPDPKHYLPLYLRPAT

SEQ ID NO: 9 - protein, 584 aa, Medicago truncatula
PVLLGAIYLGIRRHLHFRYNLLHVGGVSGNNYDTQHYAYRTPAGTCNHPDDHLIGSQGTIIGRNMPPTTLNYGLLDPHPAVVTSKLLARKSFIDTGKQFNMIACSWIQFMIHDWIDHLEDTEQVEIGVPDGYSSGCPLKTFKFFKTKKFQTGSSHMKFGFQNTRTPWWDGSVIYGNNEKGMGRVRTFKEGKLKISEDGLLEHDEKGIPVSGDVRNSWAGYSLLQALFIKEHNAVCDMLKEHYPDFDDEQLYRYARLVTSAVIAKIHTIDWTVELLKTDTLLASMRINWYGFLGKKFKDSFGNILGPELSGLVGLKEPRDHGVPYSLTEEFTSVYRMHALLPEELVLRNIKPTTGEDKCPSILEKVPMTEMIGKQGEKRLSKIGMEQMLVSMGHQPCGAITLWNFPTWLRNLIAHDIDGEERPDPVDIATMEVYRDRERGVARYNEFRRNMLMIPISKWEDLTDDEEVNEALKEVYDDDVEKLDLIVGLHAEKKIKGFAISETAFFIFVIMASRRLEADRFFTTNFNSKTYTNQGFEWVNKTESLKDVIDRHFPEMTKNWMTSSSAFSVWDSMPDPKKYIPLYLR

SEQ ID NO: 10 - protein, 631 aa, Arabidopsis thaliana
MGFSPSSSWFLHPQLHHVVSKMSYFDAFLFYIVHLVDKLGLWHRFPVLLGVAYLGLRRHLHQRYNLVHVGPINGQGYDTDEFCYRTADGKCNHPSDNTIGSQGSFIGRNMPPSTSQYGILDPHPSVVATKLLARKRFIDNGDQFNVIACSWIQFMIHDWVDHLEDTHQIELEAPEEVASGCPLKSFKFLRTKKVPTDDHHKSGAVNTRTPWWDGSVIYGNDETGMRRVRVFKDGKLKISGDGLLERDERGVPISGDIRNSWSGFSLLQALFVKEHNSVCDMLKERYPDFDDEKLYRTARLVTAAVIAKVHTIDWTIELLKTDTLTAGMRINWYGFFGKKVKDMVGARFGPLFSGLVGLKKPNDHGVPYSLTEEFVSVYRMHCLLPETLILRDMNSENVDKENPAIEREIPMTELIGKKAGEKASKLGFEQLLVSMGHQSCGALTLWNYPNWMRNLVAQDIDGEDRPHLIDMAALEIYRDRERGVPRYNEFRKNLLMSPISKWEELTDDEEAIKVLREVYEDDIEKLDLNVGLHAEKKIKGFAISETAFFIFLLVASRRLEADRFFTTNFNEKTYTKEGLEWVNTTETLKDVIDRHFPRLTDQWMRCSSAFSVWGSDPNPKNWVPLYLRSAP

SEQ ID NO: 11 - protein, 602 aa, Citrus sinensis
VIHILDKLDLWHRLPVLLGLAYLGIRRHLHQRYNLLHVGEINGQKYDTEEICYRTADGTCNHPSDDTIGSQGTFFGRNMPPSTSTYGLLDPHPTVVATKLLARKKFIDNGKQFNMIACSWIQFMIHDWTDHLEDSKQVELTAPDEEIASGCPLKSFKFFKTKGVPTSTPSVKTGSLNTRTPWWDASVIYGNNEEGMKRVRTFKDGKLKIGGDGLLEHDEKWIPISGDIRNFWAGFTLLQALFVKEHNAVCDKLKDHYPDLDDEKLYRHARLVTSAVIAKVHTIDWTVELLKTDTLSAGMRINWYGLLGKKFKDLFGHICGPILSGLVGLKKPRDHGVPYSLTEEFASVYRMHSLLPDKLILRDINSTKSDYACPPVQQEVAMKEMAGKEGERRLSKIGMEQMLVSMGHQACGAVTLWNYPLWMRNLVAHDINGEDRPNPVDMAALEIYRDRERGVSRYNEFRRNLLMIPISKWEDLTDDKEVIKVLQEVYGDDVEKMDLQVGLHAEKKIKGFAISETAFFIFLLIASRRLEADRFFTTNFNSKTYTEKGLEWVNKTETLKDVIDRHFPEMTKKWMRCSSAFSVWDSEPNQSNYIPLYLRLAP

SEQ ID NO: 12 - protein, 911 aa, Pseudomonas alcaligenes
MSVWVTWPSLVKFGTLGIYAGLITLALERDVLFKENLFDVDNLPTANATITCDARSQVARTEDGTCNILSNPAEGSVYRRFGRNVNPAVTHGETEADTLLSPNPREVSNVLMARGEFKPAPSLNFIAASWIQFMVHDWVEHGPNAEANPIQVPLPAGDVLGSGNLSVRRTQADPTRTAAEAGKPATYRNHNTHWWDGSQLYGSNKDTNDKVRAFVDGKLKINPDGTLPTDFISGKPITGFNENWWVGLSMLHQLFTKEHNAIAAMLKQKYPDKDDQWLYDHARLVNAALMAKIHTVEWTPAVIANPVTERAMYANWWGLLGSGPNRDKYQEEARMLQEDLASSNSFVLRILGIDGSQAGSSAIDHALAGIVGSTNPNNYGVPYTLTEEFVAVYRMHPLMRDKVDVYDIGSNIISRSVPLQNTRDRDAESLLNGEHPERLWYSFGITNPGSLTLNNYPNFLRNLSIPLVGNIDLATIDVLRDRERGVPRYNEFRREIGLNPITKFEDLTTDPATLANLKRIYGNDIEKIDTLVGMLAETVRPDGFAFGETAFQIFIMNASRRLMTDRFYTKDYRPEIYTAEGLAWVENTTMVDVLKRHNPDLVDSLVGVENAFKPWGLNIPADYQTWPAKAKQDNLWVNGALRSQYADGQLPQLADTNTSALLANTLWKKVREDVDVVPADYAKGMHQHGVMAKVKFKPVAGNPYTGLFQGADHGLLRLSLAAEPGKNGFQPGLSWKAFVDGKPSRNVAALQSWTGQGQNYNFFANELSQIVDAGLVDSLQVLFAAVSLKPTQLRVDHLAKIKQDGQSVSSVKAPTQVYFVPRAEVRSLFSTAAHDFRNDLVTLNAGTTLYDVYATSMEVKTSIIPSTNRSYAQQRRSSAVKVGELELTSPFIASAFGDSGVFFKHQRSEDK

SEQ ID NO: 13 - protein, 964 aa, Streptomyces avermitilis
MTETGRHEQQYERYEGGSPEAERQVFERLAREIMEVQVKNQRAQGGGISRTFHAKAPLAVENARLRFHDDLPEALRVGFAQPGADYPATVRLSNASGVQQGDGSPDLRGAAVRVRVSEDESHDLLATSHPVSHARDAREFVAFAKAMAGARSPLQKAFGLFVKLPLAVGLGTANRMRRNVQAAARHTVDSLASETYWSRGAILWGEAGPVRYLLRPAPGSPPPLPCDPNDPDFLHRELAQRLARTDIAFDLCVQRFVDERRTPVEDASVEWQEAIAPAQPIARLTIPGQDLDDAKARTVARRIEDLAFNPWHTTDDFRPLGNINRARKAAYGASSAHRLGLRFSTAEPWQNRLLTPPAGAAFGLLNRVLPWHRLPLRLSLLNLVFLRKALRRFNLIDTEPREAPPKAQPVPEPIPERLRTERSYDGSYDDLSEPGMGAVGAAFGRNVTPDYRPDLFDTPNPVTVSRRLLYRESFQPATSLNILAAAWIQFQVHDWVNHRRHRPGGRTVEVPLPPGSGDWHNTPGGPPENVMRFAENEGLELPGDRPPILFGNVASHWWDGSEVYGEDEQTARFLREPDGGARLRLEDGHLPGGTNGIPLTGFSESWWMGLSAMHTLFAREHNAVCDALRAEYPSMSEERIYRTARLVVSALIAKIHTVEWTPAILATEAIDIGLHTNWQGPPRNWLNKLGLWLFEAHSLTGIPGTRPDHHGVPYSLTEDFVTVYRMHPLIPDDYELREHHFGQRLETVGFLDIQGGAAEAKIRKTGLANTLYSFGIAHPGAITLHNFPRSLQQFERDGEIIDLSVVDLVRTRRRGVPRYNDFRAGLHKKRIRSFEELTRNAETLARLKEVYRSVDEVDTMVGLLAENPPAGFGFSDTAFRIFILMATRRLQSDRFLTVDYRPEVYTPLGIDWVEKGGMNSVILRHCPELASLMPRRASAFAPWRTVQPAANGGPPDNGGPGDNG

SEQ ID NO: 14 - protein, 620 aa, Mycolicibacterium fortuitum
MVTTARQAPVLIATAWSRSRSLTVALAARVAQQIDQTVGWARLPKAVGLAVLIGLRHQLRTSNLYAAEPAPVPPGGPVGVGNYLGARTRDGSYNDLADPRMGAVGCRFGRNVPPEHSYPESPQRLLDPNPRLISRTLLTRDSFQPATTLNLLAAAWIQFEVHDWFAHGSAATQPWVVPLHDDDPWPQRPMRVERTVPDPHPSPVGPPTFVTQESHWWDASQIYGTTPELASALRAPEGGKLRIDESGLPPPEVEAVADLTGTAGNFWVGLALLHSLFMLEHNAICDHLAEAYPYLTGQQLYDKARLVNSALMAKIHTVDWTPAIIAHPTTVTAMHVNWFGLLGKKLGGRFRRGYRPFGSSPLLYGIPGSPTTHHGVPYSLTEEFVAVYRMHPLIPDEFTFRSLADDHVIAQHELPELSVLNVRARLSETPMADLLYSFGRGHPGALSLHNFPRHLQHMHRVDGTLIDLATIDLIRCRERGVPRYNEFRKLFRLKPVKTFEELTGDAALATELREAYDDDVDLVDLLIGLYAEPKPPGFGFSDTAFRVFILMATRRLESDRFFTTDFREETYTVAGMKWVQDNDMRSVLLRHYRELTPALAGVANPFAPWNRVSPTRKAST

SEQ ID NO: 15 - protein, 637 aa, Hordeum vulgare
VLRAQHISISISRFSFHQRAMGSGLFKPRVHPDLRDVFSKMSFGDKIGFLFIHAFDKRNLWHKMPVPIGLLYLNTRRTLLEKYNLLAVGSSHGAPFDPKEFPYRTGDGKYNNPDNAEAGSQYTFFGRNMKPVDQQDELMSPDPFVVATKLLARREYKDTGKQFNILAAAWIQFMVHDWMDHMEDTKQIEITAPKEVANKCPLKSFKFYATKEQPTNSGGIKTGYRNVRTAWWDGSAVYGNNEKQEKKIRTYVDGKLVIGDDGLLLHEENGVPLSGDVRNGWVGISILQALFVKEHNAVCDAIKEEHPKLSDEELFRYAKLVTSAVIAKIHTIDWTVELLKTKTMRAGMRANWYGLLGKKIKDTFGHIGGTALGGLVGLKKPINHGVPYSLTEEFTSVYRMHPLVPSTLKLRDPTGQPGANNPPPYLEDIDIGELVGLKGEDQLSKIGFEKQTLSMGYQACGALELWNYPSFFRDLIPQNLDGTNRSDRIDLAALEVYRDRERSVPRYNEFRRRLFLIPIKCWEDLTSDNDAIEAIRAIYGDDVEKLDLLVGLLAEKKIKGFAISETAFNIFILMASRRLEADRFLTSNFNEKTYTKKGMQWVKTTEGLRDVINRHYPKITANWMKSSSAFSVWDADY

SEQ ID NO: 16 - protein, 619 aa, Zea mays
MGSGLFKPCVHPDFRVVFSKMSFGDKIGFLFVHAFDKRNLWHKMPVLIGLLYLNTRRTLLEKYNLLAVGSSHGALIDPKDQFMYRTGDGKYNDPDNAEAGSQYTFFGRNMKPVDQEYELMSPDPFVVATKLLARREYKDTGKQFNILAAAWIQFMVHDWMDHMEDTKQIEITAPNEVANKCPLKSFKFYATKELPTNSDGTIKTGYYNVRTAWWDGSAIYGNNDKKAEKLRTYVDGKLVIGDDGLLLHEENGVALLGDVRNSWVGVSILQALFVKEHNAVCDAIKEEHPNLSDEELYRYARLVTSAVIAKVHTIDWTVELLKTKTMRAGMRANWYGLLGKKIKDTFGHIGGPALGGLVGLKKPINHGVPYSLTEEFTSVYRMHSLLPSTLKLRDPTGQPDANNSPPYLKDVDIGELVGLKGEGQLSKIGFEKEILSMGYQACGALELWNYPSFFRDLIPQNLDGTNRSDRIDLAALEVYRDRERSVPRYNEFRRRLFLIPIKCWEDLTSDKDAIEAIRAIYGDDVEKLDLLVGLMAEKKIKGFAISETAFNIFILMASRRLEADRFFTSNFNEKTYTKKGMQWVKTTEGLRDVINRHYPEISAKWMKSSSAFSVWDADY

SEQ ID NO: 17 - protein, 617 aa, Hordeum vulgare
MGSGLFKPRVHPDLRDVFSKMSFGDKIGFLFIHAFDKRNLWHKMPVPIGLLYLNTRRTLLEKYNLLAVGSSHGAPFDPKEFPYRTGDGKYNDPHNAEAGSQYTFFGRNMKPVDQQDELMSPDPFVVATKLLARREYKDTGKQFNILAAAWIQFMVHDWMDHMEDTKQIEITAPKEVANECPLKSFKFYATKEQPTNSDGIKTGYHNIRTAWWDGSAVYGNNEKQEKKIRTYADGKLVIGDDGLLLHEENGVPLSGDVRNGWVGISILQALFVKEHNAVCDAIKEEHPNLSDEELYRYAKLVTSAVIAKIHTIDWTVELLKTKTLRAGMRANWYGLLGKKIKDTFGHIGGTALGGLVGLKKPINHGVPYSLTEEFTSVYRMHPLIPSTLKLRDPTGQPAADNSPPYLEDIDIGELVGLKGEDQLSKIGFEKQTLSMGYQACGALELWNYPSFFRDLIPQNLDGTNRSDRIDLAALEVYRDRERSVPRYNEFRRRLFLIPIKCWEDLTSDNDAIEAIREIYGDDVEKLDLLVGLLAEKKIKGFAISETAFNIFILMASRRLEADRFLTSNFNEKTYTKKGMQWVKTTEGLRDVINRHYPEITTNWMKSSSAFSVWDADY

SEQ ID NO: 18 - protein, 617 aa, Hordeum vulgare
MGSGLFKPRVHPDLRDVFSKMSFGDKIGFLFIHAFDKRNLWHKMPVPIGLLYLNTRRTLLEKYNLLAVGSSHGAPFDPKEFPYRTGDGKYNNPDNAEAGSQYTFFGRNMKPVDQQDELMSPDPFVVATKLLARREYKDTGKQFNILAAAWIQFMVHDWMDHMEDTKQIEITAPKEVANKCPLKSFKFYATKEQPTNSGGIKTGYRNVRTAWWDGSAVYGNNEKQEKKIRTYVDGKLVIGDDGLLLHEENGVPLSGDVRNGWVGISILQALFVKEHNAVCDAIKEEHPKLSDEELFRYAKLVTSAVIAKIHTIDWTVELLKTKTMRAGMRANWYGLLGKKIKDTFGHIGGTALGGLVGLKKPINHGVPYSLTEEFTSVYRMHPLVPSTLKLRDPTGQPGANNPPPYLEDIDIGELVGLKGEDQLSKIGFEKQTLSMGYQACGALELWNYPSFFRDLIPQNLDGTNRSDRIDLAALEVYRDRERSVPRYNEFRRRLFLIPIKCWEDLTSDNDAIEAIRAIYGDDVEKLDLLVGLLAEKKIKGFAISETAFNIFILMASRRLEADRFLTSNFNEKTYTKKGMQWVKTTEGLRDVINRHYPKITANWMKSSSAFSVWDADY

SEQ ID NO: 19 - protein, 597 aa, Hordeum vulgare
MSFGDKIGFLFIHAFDKRNLWHKMPVPIGLLYLNTRRTLLEKYNLLAVGSSHGAPFDPKEFPYRTGDGKYNDPHNAEAGSQYTFFGRNMKPVDQQDELMSPDPFVVATKLLARREYKDTGKQFNILAAAWIQFMVHDWMDHMEDTKQIEITAPKEVANECPLKSFKFYATKEQPTNSDGIKTGYHNIRTAWWDGSAVYGNNEKQEKKIRTYADGKLVIGDDGLLLHEENGVPLSGDVRNGWVGISILQALFVKEHNAVCDAIKEEHPNLSDEELYRYAKLVTSAVIAKIHTIDWTVELLKTKTLRAGMRANWYGLLGKKIKDTFGHIGGTALGGLVGLKKPINHGVPYSLTEEFTSVYRMHPLIPSTLKLRDPTGQPAADNSPPYLEDIDIGELVGLKGEDQLSKIGFEKQTLSMGYQACGALELWNYPSFFRDLIPQNLDGTNRSDRIDLAALEVYRDRERSVPRYNEFRRRLFLIPIKCWEDLTSDNDAIEAIREIYGDDVEKLDLLVGLLAEKKIKGFAISETAFNIFILMASRRLEADRFLTSNFNEKTYTKKGMQWVKTTEGLRDVINRHYPEITTNWMKSSSAFSVWDADY

SEQ ID NO: 20 - protein, 655 aa, Hordeum vulgare
AACTQAWVEHLIFSRAGSSESSAHLHLHLQVFLPPEVAMGSGLFKPRVHPDLRDVFSKMSFGDKIGFLFIHAFDKRNLWHKMPVPIGLLYLNTRRTLLEKYNLLAVGSSHGAPFDPKEFPYRTGDGKYNNPDNAEAGSQYTFFGRNMKPVDQQDELMSPDPFVVATKLLARREYKDTGKQFNILAAAWIQFMVHDWMDHMEDTKQIEITAPKEVANKCPLKSFKFYATKEQPTNSGGIKTGYRNVRTAWWDGSAVYGNNEKQEKKIRTYVDGKLVIGDDGLLLHEENGVPLSGDVRNGWVGISILQALFVKEHNAVCDAIKEEHPKLSDEELFRYAKLVTSAVIAKIHTIDWTVELLKTKTMRAGMRANWYGLLGKKIKDTFGHIGGTALGGLVGLKKPINHGVPYSLTEEFTSVYRMHPLVPSTLKLRDPTGQPGANNPPPYLEDIDIGELVGLKGEDQLSKIGFEKQTLSMGYQACGALELWNYPSFFRDLIPQNLDGTNRSDRIDLAALEVYRDRERSVPRYNEFRRRLFLIPIKCWEDLTSDNDAIEAIRAIYGDDVEKLDLLVGLLAEKKIKGFAISETAFNIFILMASRRLEADRFLTSNFNEKTYTKKGMQWVKTTEGLRDVINRHYPKITANWMKSSSAFSVWDADY

SEQ ID NO: 21 - protein, 574 aa, Hordeum vulgare
MPVPIGLLYLNTRRTLLEKYNLLAVGSSHGAPFDPKEFPYRTGDGKYNDPHNAEAGSQYTFFGRNMKPVDQQDELMSPDPFVVATKLLARREYKDTGKQFNILAAAWIQFMVHDWMDHMEDTKQIEITAPKEVANECPLKSFKFYATKEQPTNSDGIKTGYHNIRTAWWDGSAVYGNNEKQEKKIRTYADGKLVIGDDGLLLHEENGVPLSGDVRNGWVGISILQALFVKEHNAVCDAIKEEHPNLSDEELYRYAKLVTSAVIAKIHTIDWTVELLKTKTLRAGMRANWYGLLGKKIKDTFGHIGGTALGGLVGLKKPINHGVPYSLTEEFTSVYRMHPLIPSTLKLRDPTGQPAADNSPPYLEDIDIGELVGLKGEDQLSKIGFEKQTLSMGYQACGALELWNYPSFFRDLIPQNLDGTNRSDRIDLAALEVYRDRERSVPRYNEFRRRLFLIPIKCWEDLTSDNDAIEAIREIYGDDVEKLDLLVGLLAEKKIKGFAISETAFNIFILMASRRLEADRFLTSNFNEKTYTKKGMQWVKTTEGLRDVINRHYPEITTNWMKSSSAFSVWDADY

SEQ ID NO: 22 - protein, 617 aa, Hordeum vulgare
MGSGLFKPRVHPDLRDVFSKMSFGDKIGFLVIHAFDKRNLWHKMPVPIGLLYLNTRRTLLEKYNLLAVGSSHGAPFDPKEFPYRTGDGKYNNPDNAEAGSQYTFFGRNMKPVDQQDELMSPDPFVVATKLLARREYKDTGKQFNILAAAWIQFMVHDWMDHMEDTKQIEITAPKEVANKCPLKSFKFYATKEQPTNSGGIKTGYRNVRTAWWDGSAVYGNNEKQEKKIRTYVDGKLVIGDDGLLLHEENGVPLSGDVRNGWVGISILQALFVKEHNAVCDAIKEEHPKLSDEELFRYAKLVTSAVIAKIHTIDWTVELLKTKTMRAGMRANWYGLLGKKIKDTFGHIGGTALGGLVGLKKPINHGVPYSLTEEFTSVYRMHPLVPSTLKLRDPTGQPGANNPPPYLEDIDIGELVGLKGEDQLSKIGFEKQTLSMGYQACGALELWNYPSFFRDLIPQNLDGTNRSDRIDLAALEVYRDRERSVPRYNEFRRRLFLIPIKCWEDLTSDNDAIEAIRAIYGDDVEKLDLLVGLLAEKKIKGFAISETAFNIFILMASRRLEADRFLTSNFNEKTYTKKGMQWVKTTEGLRDVINRHYPKITANWMKSSSAFSVWDADY

SEQ ID NO: 23 - protein, 617 aa, Hordeum vulgare
MGSGLFKPRVHPDLRDVFSKMSFGDKIGFLFIHAFDKRNLWHKMPVPIGLLYLNTRRTLLEKYNLLAVGSSHGAPFDPKEFPYRTGDGKYNDPHNAEAGSQYTFFGRNMKPVDQQDELMSPDPFVVATKLLARREYKDTGKQFNILAAAWIQFMVHDWMDHMEDTKQIEITAPKEVANECPLKSFKFYATKEQPTNSDGIKTGYHNIRTAWWDGSAVYGNNEKQEKKIRTYADGKLVIGDDGLLLHEENGVPLSGDVRNGWVGISILQALFVKEHNAVCDAIKEEHPNLSDEELYRYAKLVTSAVIAKIHTIDWTVELLKTKTLRAGMRANWYGLLGKKIKDTFGHIGGTALGGLVGLKKPINHGVPYSLTEEFTSVYRMHPLIPSTLKLRDPTGQPAADNSPPYLEDIDIGELVGLKGEDQLSKIGFEKQTLSMGYQACGALELWNYPSFFRDLIPQNLDGTNRSDRIDLAALEVYRDRERSVPRYNEFRRRLFLIPIKCWEDLTSDNDAIEAIRAIYGDDVEKLDLLVGLLAEKKIKGFAISETAFNIFILMASRRLEADRFLTSNFNEKTYTKKGMQWVKTTEGLRDVINRHYPKITANWMKSSSAFSVWDADY

SEQ ID NO: 24 - protein, 629 aa, Phoenix dactylifera
MGLCLFRPFVHPDFHGVLSRMSLGDKLSFLFVHTLDRLNLWHKLPVLLGLVYLERRRALHDKYNLLNVGKIDGIPFNPDDYPYRTMNGEYNDPENNKVGSQLTFFGRNMPPMEQKLTSPDPVVVATKLLARRTYKDTGKEFNLIAAAWIQFMVHDWMDHLEDTQQVELTAPPEVANECPLKSFKFYQTKEIGIDTKGIKTGHKNIRTHWWDGSAIYGSEERKADKVRTFVDGKLKIGANNLLDHDDEGIAISGDIRNSWAGVSTLQALFIKEHNAVCDALKAEYPHLNDQELYRYAKLVTSAVIAKIHTIDWTVELLKTHTMNAAMHANWYGLLGKTIKDIFGHIGGPALSGLVGLQKPNNHGVPYSLTEEFTSVYRMHSLLPDSLTLRNINTNPGPNKSPEYLEDIQMEDLVGIRGESTLTKIGFERQLVSMGHQACGALELWNYPWFFRNLIPQNVDGSERPDHVDMPALEVYRDRERSTPRYNQFRRGLLMIPISKWEDLTDDHEAVETLREVYGDDVEKLDLLVGLMAEKKIKGFAISETAFFIFIIMASRRLEADRFFTSYFNEETYTKKGFKWVNSTESLRDVIQRHYPDLAKKWMNSTSAFSVWEAPPNSFNPIPLLLRFPA

SEQ ID NO: 25 - protein, 618 aa, Oryza sativa
MGSGLFKPRVHPDLRDVFSKMSFFDKIGFLFIHAFDKRNLWHKVPVPIGLLYLNTRRTLLEKYNLLAVGRSSHGALFDPKEFLYRTEDGKYNDPHNAEAGSQNTFFGRNMEPVDQKDELMSPDPFVVATKLLARREYKDTGKQFNILAAAWIQFMVHDWMDHMEDTGQIEITAPKEVANECPLKSFKFHPTKELPTNSDGIKIGHYNVRTAWWDGSAVYGNNEEKAEKLRTYVDGKLVIGDDGLLLHKENGVALSGDIRNSWAGVSILQALFVKEHNAVCDAIKEEHPNLSDEELYRYAKLVTSAVIAKVHTIDWTVELLKTKTMRAAMRANWYGLLGKKIKDTFGHIGGPILGGLVGLKKPNNHGVPYSLTEEFTSVYRMHSLIPSTLKLRDPTGQPDANNSPPYLEDIDIGEMTGLKGEEQLSKIGFEKQALSMGYQACGALELWNYPSFFRNLIPQNLDGTNRSDRIDLAALEVYRDRERSVPRYNEFRRRLFLIPIKSWEDLTSDKDAIETIRAIYGDDVEKLDLLVGLMAEKKIKGFAISETAFNIFILMASRRLEADRFFTSNFNEETYTKKGMQWVKTTEGLRDVINRHYPEISAKWMKSSSAFSVWDADY

SEQ ID NO: 26 - protein, 638 aa, Musa acuminata
MCLPLFHPFIHPAFHDVFETMPFGDKLSFLYVHALDKLKLWHKLPVFLGLTYLQQRRTLHEKYSLLNVGMPDRTPFNPDDYAYRTDDGEYNDPENSQAGSQNTFFGRNMPPMEQNNHLMNPDPAVVATKLLARRTYKDTGKQFNLIAASWIQFMVHDWIDHLEDTEQVVLPSPSLVAHECPLKSFRFYRTKEVPTGGEGIETGHLNIRTSWWDGSAIYGSEGKKEAKVRTRVDGKLKIGDNDLLQHEVNGIAISGDIRNSWAGVSTLQALFVKEHNAVCDALKASNANLQEEYPDLNDEELFRYARLVTSAVIAKIHTIDWTVELLKTHTLNAAMHANWYGLLGKKIKDTFGHIGGPALGGLVGLKKPNNHGVPYSLTEEFTSVYRMHSLLPDSLKLRNINTNPGPNKSPEYLKDVKMEELVGITGESTLNEIGFERQVVSMGHQACGALELWNYPFFFRDLIAQNVDGTERPDHVDMPVLEIYRDRERKIPRYNQFRRKLMMIPISKWEDLTDDKEAIETIREIYGDDVEKLDLLVGLMAEKKIKGFAISETAFFIFIIMASRRLEADRFFTSYFNEKTYTKRGFKWVNTTESLRDVLLRHYPHTVSKWMNSTSAFSVWDAPPNSFNPIPLLLRFPS

SEQ ID NO: 27 - protein, 666 aa, Musa balbisiana
MCLPLLHPFIHPAFHDVFETMTFGDKLSFLYVHALDRLKLWHKLPVFLGLTYLQQRRTLHEKYSLVNVGTPDRTPFNPDDYAYRTDDGAYNDPENSQAGSQNTFFGRNMPPMEQKNHLMNPDPAVVATKLLARRTYKDTGKQFNLIAASWIQFMVVLPSPSLVAHGCPLKSFRFYSTKEVPTGGEGIETGHLNIRTSWWDGSAIYGSEGKKEAKVRTRVDGKLKIGDNDLLQHEVNGIAISGDIRNSWAGVSTLQALFVKEHNAVCDALKASNAYLQEEYPDLNDEELFRYARLVTSAVIAKIHTIDWTVELLKTHTMNAAMHANWYGLLGKKIKDTFGHIGGPALGGLVGLKKPNNHGVPYSLTEEFTSVYRMHSLLPDSLKLRNINTNPGPNKSPEYLKEYLHVTPSLYIYIYIYMCVCVCVCIHINVHNLVSILIDSLNSVRMEELVGITGESTLNEIGFERQVVSMGHQACGALELWNYPFFFRDLIAQNVDGTERPDHVDMPVLEIYRDRERKIPRYNQFRRKLMMIPISKWEDLTDDKEAIETIREIYGDDVEKLDLLVGLMAEKKIKGFAISETAFFVFILMASRRLESDRFFTSYFNEKTYTKRGFKWVNTTESLRDVLLRHYPHTVSKWMNSTSAFSVWDAPPNSFNPIPLLLRFPS

SEQ ID NO: 28 - protein, 617 aa, Triticum aestivum
MGSGLFKPRVHPDLRDVFSKMSLGDKIGFLFIHAFDKRNLWHKMPVLIGLLYLNTRRTLLEKYNLLAVGSSHGTLFDPKEFPYRTGDGKYNDPHNAEAGSQYTFFGRNMKPVDQQDELMSPDPFVVATKLLARREYKDTGKQFNILAAAWIQFMVHDWMDHMEDTKQIEITAPKEVANECPLKSFKFYATKEHPTNSDGIKTGYNNVRTAWWDGSAVYGNNEKQVEKTRTYVDGKLVIGDDGLLLHEENGVPLSGDVRNGWVGVSILQALFVKEHNAVCDAIKEDHPNLSDEELYRYAKLVTSAVIAKIHTIDWTVELLKTKTMRAAMRANWYGLLGKKFKDTFGHIGGTALGGLVGLKKPINHGVPYSLTEEFTSVYRMHSLIPTTLKLRDPTGQPAANNSPPYLEDIDIGELVGLKGEDQLSKIGFEKQTLSMGYQACGALELWNYPSFFRDLIPQNLDGTNRSDRIDLAALEVYRDRERSVPRYNEFRRRLFLIPIKSWEDLTSDKDAIEAIRAIYGDDVEKLDLLVGLMAEKKIKGFAISETAFNIFILMASRRLEADRFITSNFNEKTYTKKGMQWVKTTEGLRDVINRHYPEITANWMRSSSAFSVWDADY

SEQ ID NO: 29 - protein, 617 aa, Triticum aestivum
MGSGLFKPRVHPDLRDVFSKMSFGDKIGFLFIHAFDKRNLWHKMPVPIGLLYLNTRRTLLEKYNLLAVGSSHGALFDPKEFPYRTGDGKYNDHHNAEAGSQYTFFGRNMKPVDQQDELMSPDPFVVATKLLARREYKDTEKQFNILAAAWIQFMVHDWMDHMEDTKQIEITAPKEVANECPLKSFKFYATKEQPTNSDGIKTGYYNVRTAWWDGSAVYGNNEKEAKKIRTYVDGKLVIGDDGLLLHEENGVPLSGDVRNGWVGVSILQALFVKEHNAVCDAIKEEHPKLSDEELYRYAKLVTSAVIAKIHTIDWTVELLKTKTMRAAMRANWYGLLGKKIKDTFGHIGGTALGGLVGLKKPINHGVPYSLTEEFTSVYRMHSLIPSTLKLRDPTGQPAANNSPPYLEDIDIGELVGLKGEDQLSKIGFDKQTLSMGYQACGALELWNYPSFFRDLIPQNLDGTNRSDRIDLAALEVYRDRERSVPRYNEFRRRLLLIPIKSWEDLTSDKDAIEAIRAIYGDDVEKLDLLVGLMAEKKIKGFAISETAFNIFILMASRRLEADRFITSNFNEKTYTKKGMQWVKTTEGLRDVINRHYPEITANWMKSSSAFSVWDADY

SEQ ID NO: 30 - protein, 569 aa, Oryza barthii
MGSGLFKPRVHPDLRDVFSKMSFFDKIGFLFIHAFDKRNLWHKVPVPIGLLYLNTRRTLLEKYNLLAVGRSSHGALFDPKEFLYRTEDGKYNDPHNAEAGSQNTFFGRNMEPVDQKDELTSPDPFVVATKLLARREYKDTGKQFNILAAAWIQFMVHDWMDHMEDTGQIEITAPKEVANECPLKSFKFHPTKELPTNSDGIKIVYGNNEERAEKLRTYVDGKLVIGDDGLLLHKENGVALSGDIRNSWAGVSILQALFVKEHNAVCDAIKEEHPNLSDEELYRYAKLVTSAVIAKVHTIDWTVELLKTKTMRAAMRANWYGLLGKKIKDTFGHIGGPILGGLVGLKKPNNHGVPYSLTEDIDIGEMIGLKGEEQLSKIGFEKQALSMGYQACGALELWNYPSFFRNLIPQNLDGTNRSDRIDLAALEVYRDRERSVPRYNEFRRRLFLIPIKSWEDLTSDKDAIETIRAIYGDDVEKLDLLVGLMAEKKIKGFAISETAFNIFILMASRRLEADRFFTSNFNEETYTKKGMQWVKTTEGLRDVINRHYPEITAKWMKSSSAFSVWDADY

SEQ ID NO: 31 - protein, 617 aa, Aegilops tauschii
MGSGLFKPRVHPDLRDVFSKMSFGDKIGFLFIHAFDKRNLWHKMPVPIGLLYLNTRRTLLEKYNLLAVGSSHGALFDPKEFPYRTGDGKYNDHHNAEAGSQYTFFGRNMKPVDQQDELMSPDPFVVATKLLARREYKDTEKQFNILAAAWIQFMVHDWMDHMEDTKQIEITAPKEVANECPLKSFKFYATKEQPTNSDGIKTGYYNVRTAWWDGSAVYGNNEKEAKKIRTYVDGKLVIGDDGLLLHEENGVPLSGDVRNGWVGVSILQALFVKEHNAVCDAIKEEHPKLSDEELYRYAKLVTSAVIAKIHTIDWTVELLKTKTMRAAMRANWYGLLGKKIKDTFGHIGGTALGGLVGLKKPINHGVPYSLTEEFTSVYRMHSLIPSTLKLRDPTGQPAANNSPPYLEDIDIGELVGLKGEDQLSKIGFEKQTLSMGYQACGALELWNYPSFFRDLIPQNLDGTNRSDRIDLAALEVYRDRERSVPRYNEFRRRLLLIPIKSWEDLTSDKDAIEAIRAIYGDDVEKLDLLVGLMAEKKIKGFAISETAFNIFILMASRRLEADRFITSNFNEKTYTKKGMQWVKTTEGLRDVINRHYPEITANWMKSSSAFSVWDADY

SEQ ID NO: 32 - protein, 617 aa, Triticum turgidum
MGSGLFKPRVHPDLRDVFSKMSLGDKIGFLFIHAFDKRNLWHKMPVLIGLLYLNTRRTLLEKYNLLAVGSSHGTLFDPKEFPYRTGDGKYNDPHNAEAGSQYTFFGRNMKPVDQQDELMSPDPFVVATKLLARREYKDTGKQFNILAAAWIQFMVHDWMDHMEDTKQIEITAPKEVANECPLKSFKFYATKEQPTNSDGIKTGYNNVRTAWWDGSAVYGNNEKQAEKTRTYVDGKLVIGDDGLLLHEENGVPLSGDIRNGWVGVSILQALFVKEHNAVCDAIKEDHPNLSDEELYRYAKLVTSAVIAKIHTIDWTVELLKTKTMRAAMRANWYGLLGKKFKDTFGHIGGTALGGLVGLKKPINHGVPYSLTEEFTSVYRMHSLIPTTLKLRDPTGQPAANNSPPYLEDIDIGELVGLKGEDQLSKIGFEKQTLSMGYQACGALELWNYPSFFRDLIPQNLDGTNRSDRIDLAALEVYRDRERSVPRYNEFRRRLFLIPIKSWEDLTSDKDAIESIRAIYGDDVEKLDLLVGLMAEKKIKGFAISETAFNIFILMASRRLEADRFITSNFNEKTYTKKGMQWVKTTEGLRDVINRHYPEITANWMRSSSAFSVWDADY

SEQ ID NO: 33 - protein, 605 aa, Triticum turgidum
MGSGLFKPRVHPDLRDVFSKMSLGDKIGFLFIHAFDKRNLWHKMPVLIGLLYLNTRRTLLEKYNLLAVGSSHGTLFDPKEFPYRTGDGKYNDPHNAEAGSQYTFFGRNMKPVDQQDELMSPDPFVVATKLLARREYKDTGKQFNILAAAWIQFMVHDWMDHMEDTKQIEITAPKEVANECPLKSFKFYATKEQPTNSDGIKTGYNNVRTAWWDGSAVYGNNEKQVEKTRTYVDGKLVIGDDGLLLHEENGVPLSGDVRNGWVGVSILQALFVKEHNAVCDAIKEDHPNLSDEELYRYAKLVTSAVIAKIHTIDWTVELLKTKTMRAAMRANWYGLLGKKFKDTFGHIGGTALGGLVGLKKPINHGVPYSLTEEFTSVYRMHSLIPTTLKLRDPTGQPAANNSPPYLEDIDIGELVGLKGEDQLSKIGFEKQTLSMGYQACGALELWNYPSFFRDLIPQNLDGTNRSDRIDLAALEVYRDRERSVPRYNEFRRRLFLIPIKSWEDLTSDKDAIESIRAIYGDDVEKLDLLVGLMAEKKIKGFAISETAFNIFILMASRRLEADRFITSNFNEKTYTKKGMQWVKTTEGLRDVINRHYPEITANWMR

SEQ ID NO: 34 - protein, 617 aa, Triticum turgidum
MGSGLFKPRVHPDLRDVFSKMSLGDRIGFLFIHAFDKRNWWHKMPVLIGLLYLNTRRTLLEKYNLLAVGSSHGTLFDPKEFPYRTGDGKYNDPHNAEAGSQYTFFGRNMKPVDQQDELMSPDPFVVATKLLARREYKDTGKQFNILAAAWIQFMVHDWMDHMEDTKQIEITAPKEVANECPLKSFKFYATKEQPTNSDGIKTGYNNVRTAWWDGSAVYGNNEKQAEKTRTYVDGKLVIGDDGLLLHEENGVPLSGDIRNGWVGVSILQALFVKEHNAVCDAIKEDHPNLSDEELYRYAKLVTSAVIAKIHTIDWTVELLKTKTMRAAMRANWYGLLGKKFKDTFGHIGGTALGGLVGLKKPINHGVPYSLTEEFTSVYRMHSLIPTTLKLRDPTGQPAANNSPPYLEDIDIGELVGLKGEDQLSKIGFEKQTLSMGYQACGALELWNYPSFFRDLIPQNLDGTNRSDRIDLAALEVYRDRERSVPRYNEFRRRLFLIPIKSWEDLTSDKDAIESIRAIYGDDVEKLDLLVGLMAEKKIKGFAISETAFNIFILMASRRLEADRFITSNFNEKTYTKKGMQWVKTTEGLRDVINRHYPEITANWMRSSSAFSVWDADY

SEQ ID NO: 35 - protein, 617 aa, Triticum turgidum
MGSGLFKPRVHPDLRDVFSKMSLGDKIGFLFIHAFDKRNWWHKMPVLIGLLYLNTRRTLLEKYNLLAVGSSHGTLFDPKEFPYRTGDGKYNDPHNAEAGSQYTFFGRNMKPVDQQDELMSPDPFVVATKLLARREYKDTGKQFNILAAAWIQFMVHDWMDHMEDTKQIEITAPKEVANECPLKSFKFYATKEQPTNSDGIKTGYNNVRTAWWDGSAVYGNNEKQAEKTRTYVDGKLVIGDDGLLLHEENGVPLSGDIRNGWVGVSILQALFVKEHNAVCDAIKEDHPNLSDEELYRYAKLVTSAVIAKIHTIDWTVELLKTKTMRAAMRANWYGLLGKKFKDTFGHIGGTALGGLVGLKKPINHGVPYSLTEEFTSVYRMHSLIPTTLKLRDPTGQPAANNSPPYLEDIDIGELVGLKGEDQLSKIGFEKQTLSMGYQACGALELWNYPSFFRDLIPQNLDGTNRSDRIDLAALEVYRDRERSVPRYNEFRRRLFLIPIKSWEDLTSDKDAIESIRAIYGDDVEKLDLLVGLMAEKKIKGFAISETAFNIFILMASRRLEADRFITSNFNEKTYTKKGMQWVKTTEGLRDVINRHYPEITANWMRSSSAFSVWDADY

SEQ ID NO: 36 - protein, 634 aa, Oryza sativa
MGSGLFKPRVHPDLRDVFSKMSFFDKIGFLFIHAFDKRNLWHKVPVPIGLLYLNTRRTLLEKYNLLAVGRSSHGALFDPKEFLYRTEDGKYNDPHNAEAGSQNTFFGRNMEPVDQKDELMSPDPFVVATKLLARREYKDTGKQFNILAAAWIQFMVHDWMDHMEDTGQVGSGQFDFLENVMSGQIEITAPKEVANECPLKSFKFHPTKELPTNSDGIKIGHYNVRTAWWDGSAVYGNNEERAEKLRTYVDGKLVIGDDGLLLHKENGVALSGDIRNSWAGVSILQALFVKEHNAVSDAIKEEHPNLSDEELYRYAKLVTSAVIAKVHTIDWTVELLKTKTMRAAMRANWYGLLGKKIKDTFGHIGGPILGGLVGLKKPNNHGVPYSLTEEFTSVYRMHSLIPSTLKLRDPTGQPDANNSPPYLEDIDIGEMTGLKGEEQLSKIGFEKQALSMGYQACGALELWNYPSFFRNLIPQNLDGTNRSDRIDLAALEVYRDRERSVPRYNEFRRRLFLIPIKSWEDLTSDKDAIETIRAIYGDDVEKLDLLVGLMAEKKIKGFAISETAFNIFILMASRRLEADRFFTSNFNEETYTKKGMQWVKTTEGLRDVINRHYPEITAKWMKSSSAFSVWDADY

SEQ ID NO: 37 - protein, 617 aa, Triticum turgidum
MGSGLFKPRVHPDLRDVFSKMSLGDKIGFLFIHAFDKRNLWHKMPVLIGLLYLNTRRTLLEKYNLLAVGSSHGTLFDPKEFPYRTGDGKYNDPHNAEAGSQYTFFGRNMKPVDQQDELMSPDPFVVATKLLARREYKDTGKQFNILAAAWIQFMVHDWMDHMEDTKQIEITAPKEVANECPLKSFKFYATKEQPTNSDGIKTGYNNVRTAWWDGSAVYGNNEKQVEKTRTYVDGKLVIGDDGLLLHEENGVPLSGDVRNGWVGVSILQALFVKEHNAVCDAIKEDHPNLSDEELYRYAKLVTSAVIAKIHTIDWTVELLKTKTMRAAMRANWYGLLGKKFKDTFGHIGGTALGGLVGLKKPINHGVPYSLTEEFTSVYRMHSLIPTTLKLRDPTGQPAANNSPPYLEDIDIGELVGLKGEDQLSKIGFEKQTLSMGYQACGALELWNYPSFFRDLIPQNLDGTNRSDRIDLAALEVYRDRERSVPRYNEFRRRLFLIPIKSWEDLTSDKDAIESIRAIYGDDVEKLDLLVGLMAEKKIKGFAISETAFNIFILMASRRLEADRFITSNFNEKTYTKKGMQWVKTTEGLRDVINRHYPEITANWMRSSSAFSVWDADY

SEQ ID NO: 38 - protein, 617 aa, Triticum urartu
MGSGLFKPRVHPDLRDVFSKMSFGDKIGFLFIHAFDKRNLWHKMPVPIGLLYLNTRRTLLEKYNLLAVGSSHGALFDPKEFPYRTGDGKYNDPHNAKAGSQYTFFGRNMKPVDQQDELMSPDPFVVATKLLARREYKDTGKQFNILAAAWIQFMVHDWMDHMEDTKQIEITAPKYVANECPLKSFKFYATKEQPTNSDGIQSGYYNVRTAWWDGSAVYGNNEKEAKNIRTYVDGKLVIGDDGLLLHEENGVPLSGDVRNGWVGVSILQALFVKEHNAVCDAIKEEQPILSDEELYRYAKLVTSAVIAKIHTIDWTVELLKTKTMRAAMRANWYGLLGKKIKDTFGHIGGTALGGLVGLKEPINHGVPYSLTEEFTSVYRMHSLIPSTLKLRDPTGQPAANNSPPYLEDIDIGELVGLKGEDQLSKIGFEKQTLSMGYQACGALELWNYPSFFRDLIPQNLDGTNRSDRIDLAALEVYRDRERSVPRYNEFRRRLFLIPIKSWEDLTSDKDAIEDIRAIYGDDVEKLDLLVGLMAEKKIKGFAISETAFNIFILMASRRLEADRFITSNFNEKTYTKKGMQWVKTTEGLRDVINRHYPEITAKWMKSSSAFSVWDADY

SEQ ID NO: 39 - protein, 622 aa, Aegilops tauschii
MGSGLFKPRVHPDLRDVFSKMSFGDKIGFLFIHAFDKRNLWHKMPVPIGLLYLNTRRTLLEKYNLLAVGSSHGALFDPKEFPYRTGDGKYNDHHNAEAGSQYTFFGRNMKPVDQQDELMSPDPFVVATKLLARREYKDTEKQFNILAAAWIQFMVHDWMDHMEDTKQVGSGQIEITAPKEVANECPLKSFKFYATKEQPTNSDGIKTGYYNVRTAWWDGSAVYGNNEKEAKKIRTYVDGKLVIGDDGLLLHEENGVPLSGDVRNGWVGVSILQALFVKEHNAVCDAIKEEHPKLSDEELYRYAKLVTSAVIAKIHTIDWTVELLKTKTMRAAMRANWYGLLGKKIKDTFGHIGGTALGGLVGLKKPINHGVPYSLTEEFTSVYRMHSLIPSTLKLRDPTGQPAANNSPPYLEDIDIGELVGLKGEDQLSKIGFEKQTLSMGYQACGALELWNYPSFFRDLIPQNLDGTNRSDRIDLAALEVYRDRERSVPRYNEFRRRLLLIPIKSWEDLTSDKDAIEAIRAIYGDDVEKLDLLVGLMAEKKIKGFAISETAFNIFILMASRRLEADRFITSNFNEKTYTKKGMQWVKTTEGLRDVINRHYPEITANWMKSSSAFSVWDADY

SEQ ID NO: 40 - protein, 617 aa, Hordeum vulgare
MGSGLFKPRVHPDLRDVFSKMSFGDKIGFLFIHAFDKRNLWHKMPVPIGLLYLNTRRTLLEKYNLLAVGSSHGAPFDPKEFPYRTGDGKYNDPHNAEAGSQYTFFGRNMKPVDQQDEVMSPDPFVVATKLLARREYKDTGKQFNILAAAWIQFMVHDWMDHMEDTKQIEITAPKEVANECPLKSFKFYATKEQPTNSDGIKTGYHNIRTAWWDGSAVYGNNEKQEKKIRTYADGKLVIGDDGLLLHEENGVPLSGDVRNGWVGISILQALFVKEHNAVCDAIKEEHPNLSDEELYRYAKLVTSAVIAKIHTIDWTVELLKTKTLRAGMRANWYGLLGKKIKDTFGHIGGTALGGLVGLKKPINHGVPYSLTEEFTSVYRMHPLIPSTLKLRDPTGQPAADNSPPYLEDIDIGELVGLKGEDQLSKIGFEKQTLSMGYQACGALELWNYPSFFRDLIPQNLDGTNRSDRIDLAALEVYRDRERSVPRYNEFRRRLFLIPIKCWEDLTSDNDAIEAIREIYGDDVEKLDLLVGLLAEKKIKGFAISETAFNIFILMASRRLEADRFLTSNFNEKTYTKKGMQWVKTTEGLRDVINRHYPEITTNWMKSSSAFSVWDADY

SEQ ID NO: 41 - protein, 617 aa, Panicum miliaceum
MGSGLFKPCVHPDLRDVFSKMSFGDKIGFLFIHAFDKRNLWHKMPVPIGLLYLNTRRTLLEKYDLLAVGSSHGALFDPKEFLYRTGDGKYNDPHNAEAGSQYTFFGRNMKPVDQEDELMRPDPFVVATKLLARREYKDTGKQFNILAAAWIQFMVHDWMDHMEDTKQIEITAPKEVANECPLKSFKFHVTKELPTNSDGIKTGYYNGRTAWWDGSAIYGNNEKKAQKLRTYVDGKQVIRDDGLLLHEENGVPLSGDVRNNWAGVSILQALFIKEHNAVCDAIKEEHPNLSDEELYRYAKLVTSAVIAKVHTIDWTVELLKTKTMRAAMRANWYGLLGKKIKDTFGHIGGPALGGLVGLKKPNNHGVPYSLTEEFTSVYRMHSLIPSTLKLRDPTGQPDANNSPPYLEDIDIGELVGLKGEEQLSKIGFQKQTLSMGYQACGALELWNYPSFFRDLIPQNLDGTNRSDRIDLAALEVYRDRERSVPRYNEFRRRLFLIPIKSWEDLTSDKDAIEAIREIYGDDVEKLDLLVGLMAEKKIKGFAISETAFNIFIVMASRRLEADRFFTSNFNEKTYTKKGMQWVKTTEGLRDVINRHYPEMTAKWMKSSSAFSVWDADY

SEQ ID NO: 42 - protein, 617 aa, Panicum miliaceum
MGSGLFKPCVHPDFRLVFSKMSFGDKIAFLFIHAFDKRNLWHKMPVPIGLLYLNTRRTLLEKYDLLAVGSSHGTPFDPKEYPYRTGDGKYNDPHNAEAGSQYTFFGRNMKPVDQEHELMSPDPFVVATKLLARREYKDTVKQFNILAAAWIQFMIHDWIDHMEDTKQIEITAPKEVANECPLKSFKFLATKELPTNSDGIKTGHYNGRTAWWDGSAVYGNNEKKAEKLRTYVDGKLVIGDDGLLLHEENGVPLSGDVRNNWIGVSILQALFVKEHNAVCDAIKEEHPNLSDEELYRYAKLVTSAVIAKVHTIDWTVELLKTKTMRAAMRANWYGLLGKKIKDTFGHIGGPILGGLVGLKKPNNHGVPYSLTEEFTSVYRMHPLIPSTLKLRDPTGQPDANNSPPYMEEIDIGELVGLKGEEQLSKIGFEKQTLSMGYQACGALELWNYPSFFRDLIPQNLDGTNRSDRIDLAALEVYRDRERSVPRYNEFRRRLFLIPINSWEDLTSDKDAIKAIRAIYGDDVEKLDLLVGLMAEKKIKGFAISETAFNIFIVMATRRLEADRFFTSYFNEETYTKKGMQWVKTTEGLRDVINRHYPEITAKWMRSSSAFSVWDADY

SEQ ID NO: 43 - protein, 675 aa, Anthurium amnicola
MLSPQGAATIPGDRSGRQEEEEEERRRRKKRRRRRRLSVITMGLTFRSFIHPSLRDAYDRMTFTHKLIFLVVHGIDKLGIWHRLPVLLGLAYLEGRRTLHQKYNLLNVGKVDTTSFDPDGYPYRTDDGKYNDPNNASAGSQMTFFGRNILPQDQKDQLMDPDPFLVATKLLERRNFKDTGKQFNIIACSWIQFMIHDWVDHLEETRQIEITAPSAIASECPLSSFKFFGTESLPTNAKGIETGHLNIRTAWWDGSVIYGSNKDLGSRLRTFIEGKIKIGDNNLLLHDDEGRAISGETRNSWIGVSLLQALFVKEHNAVCDALKGQHPDFNDEKLYQHARLVTTAVIAKIHTIDWTVELLKTDTMLAGMRANWYGLLGKRFKSIFGYIGGSTLGPILSGLVGMKEPNNHGVPYSLTEDFVSVYRMHSLLPDILQVRNINLPPGPNKSPALSNDIKMENLVGIEGEKVLGELGFERQLVSMGHQACGALELWNYPTFFRNLVVQNPDGSERANHVDFPTLEVYRDRERSVPRYNQFRRSTLMLPITKWEDLTDDAGAINTLKEVYGDDIEKVDLMVGLMAEKKIKGFAISETAFFIFVLMASRRLEADRFFTSYFNEKTYTKKGLEWVNSTESLRDVITRHYPEITEKWMNSTSAFSVWNALPNRCNLIPLYLRIPM

SEQ ID NO: 44 - protein, 617 aa, Triticum aestivum
MGSGLFKPRVHPDLRDVFSKMSLGDRIGFLFIHAFDKRNWWHKMPVLIGLLYLNTRRTLLEKYNLLAVGSSHGTLFDPKEFPYRTGDGKYNDPHNAEAGSQYTFFGRNMKPVDQQDELMSPDPFVVATKLLARREYKDTGKQFNILAAAWIQFMVHDWMDHMEDTKQIEITAPKEVANECPLKSFKFYATKEQPTNSDGIKTGYNNVRTAWWDGSAVYGNNEKQAEKTRTYVDGKLVIGDDGLLLHEENGVPLSGDVRNGWVGVSILQALFVKEHNAVCDAIKEDHPNLSDEELYRYAKLVTSAVIAKIHTIDWTVELLKTKTMRAAMRANWYGLLGKKFKDTFGHIGGTALGGLVGLKKPINHGVPYSLTEEFTSVYRMHSLIPTTLKLRDPTGQPAANNSPPYLEDIDIGELVGLKGEDQLSKIGFEKQTLSMGYQACGALELWNYPSFFRDLIPQNLDGTNRSDRIDLAALEVYRDRERSVPRYNEFRRRLFLIPIKSWEDLTSDKDAIESIRAIYGDDVEKLDLLVGLMAEKKIKGFAISETAFNIFILMASRRLEADRFITSNFNEKTYTKKGMQWVKTTEGLRDVINRHYPEITANWMRSSSAFSVWDADY

SEQ ID NO: 45 - protein, 608 aa, Anthurium amnicola
EEEEEVEEEEEEKEVITMGLTLRSFIHPSLRDAYDRMTFTHKLIFLVVHGIDRLRIWHRLPVLLGLLYLEGRRILHQKYNLLNVGKIDTTTFDPDEYPNRTDDGQYNDPNNASAGSQMTFIGRNGPPQDQKDQLMDPDPFLVARTLLDRRDFKDAGKQLNMIACSWIQFMIHDWIEHLEDTRQIEITAPSAIASECPLKSFKFYGTKALPTFVRGIETGHLNIRTPWWDGSTIYGNNKRDGSRLRTFIDGKLKIGHNDLLLHDDEGKATSGDVRNSWIGVSLVQALFVKEHNAICDALKEQYPDLTDEKLFQHARLVTSAVIAKIHTIDWTVELLKTDTLLAGMRANWYGFLGKTFKSIFGFIGGSTLGPILSGLVGMKEPNNHGVPYSLTEDFVGAYRMHTLVPDILQVRNINLPPGPDKSPALLDNIKMEDLVGIEGEKVVGALEFESQLVSMGHQACGALELWNYPTFFRNLVAQNIDGSERPDHVDLPVLEIYRDRERSVPRYNQFRRNMLMHPISTWEELTDDDSAIKALKEVYRDDIEKVDLMVGLMAEKKIKGFAISETAFFIFVLMASRRLEADRFFTSDFNERAYTKKGLEWVNTTENL

SEQ ID NO: 46 - protein, 617 aa, Hordeum vulgare
MGSGLFKPRVHPDLRDVFSKMSFGDKIGFLFIHAFDKRNLWHKMPVPIGLLYLNTRRTLLEKYNLLAVGSSHGAPFDPKEFPYRTGDGKYNDPDNAEAGSQYTFFGRNMKPVDQQDELMSPDPFVVATNLLARREYKDTGKQFNILAAAWIQFMVHDWMDHMEDTKQIEITAPKEVANKCPLKSFKFYATKEQPTNSGGIKTGYRNVRTAWWDGSAVYGNNEKQEKKIRTYVDGKLVIGDDGLLLHEENGVPLSGDVRNGWVGISILQALFVKEHNAVCDAIKEEHPKLSDEELFRYAKLVTSAVIAKIHTIDWTVELLKTKTMRVGMRANWYGLLGKKIKDTFGHIGGTALGGLVGLKKPINHGVPYSLTEEFTSVYRMHPLVPSTLRLRDPTGQPGANNPPPYLEDIDIGELVGLKGEDQLSKIGFEKQTLSMGYQACGALELWNYPSFFRDLIPQNLDGTNRSDRIDLAALEVYRDRERSVPRYNEFRRRLFLIPIKCWEDLTSDNDAIEAIRAIYGDDVEKLDLLVGLLAEKKIKGFAISETAFNIFILMASRRLEADRFLTSNFNEKTYTKKGMQWVKTTEGLRDVINRHYPKITANWMKSSSAFSVWDADY

SEQ ID NO: 47 - protein, 617 aa, Hordeum vulgare
MGSGLFKPRVHPDLRDVFSKMSFGDKIGFLFIHAFDKRNLWHKMPVPIGLLYLNTRRTLLEKYNLLAVGSSHGAPFDPKEFPYRTGDGKYNDPHNAEAGSQYTFFGRNMKPVDQQDELMSPDPFVVATKLLARREYKDTGKQFNILAAAWIQFMVHDWMDHMEDTKQIEITAPKEVANECPLKSFKFYATKEQPTNSDGIKTGYHNIRTAWWDGSAVYGNNEKQEKKIRTYADGKLVIGDDGLLLHEENGVPLSGDVRNGWVGISILQALFVKEHNAVCDAIKEEHPNLSDEELYRYAKLVTSAVIAKIHTIDWTVELLKTKTLRAGMRANWYGLLGKKIKDTFGHIGGTALGGLVGLKKPINHGVPYSLTEEFTSVYRMHPLIPSTLKLRDPTGQPAADNSPPYLEDIDIGELVGLKGEDQLSKIGFEKQTLSMGYQACGALELWNYPSFFRDLIPQNLDGTNRSDRIDLAALEVYRDRERSVPRYNEFRRRLFLIPIKCWEDLTSDNDAIEAIRAIYGDDVEKLDLLVGLLAEKKIKGFAISETAFNIFILMASRRLEADRFLTSNFNEKTYTKKGMQWVKTTEGLRDVINRHYPEITTNWMKSSSAFSVWDADY

SEQ ID NO: 48 - protein, 569 aa, Oryza rufipogon
MGSGLFKPRVHPDLRDVFSKMSFFDKIGFLFIHAFDKRNLWHKVPVPIGLLYLNTRRTLLEKYNLLAVGRSSHGALFDPKEFLYRTEDGKYNDPHNAEAGSQNTFFGRNMEPVDQQDELMSPDPFVVATKLLARREYKDTGKQFNILAAAWIQFMVHDWMDHMEDTGQIGITAPKEVANECPLKSFKFHPTKELPTNSDGIKIVYGNNEERAEKLRTYVDGKLVIGDDGLLLHKENGVALSGDIRNSWAGVSILQALFVKEHNAVCDAIKEEHPNLSDEELYRYAKLVTSAVIAKVHTIDWTVELLKTKTMRAAMRANWYGLLGKKIKDTFGHIGGPILGGLVGLKKPNNHGVPYSLTEDIDIGEMIGLKGEEQLSKIGFEKQALSMGYQACGALELWNYPSFFRNLIPQNLDGTNRSDRIDLAALEVYRDRERSVPRYNEFRRRLFLIPIKSWEDLTSDKDAIETIRAIYGDDVEKLDLLVGLMAEKKIKGFAISETAFNIFILMASRRLEADRFFTSNFNEETYTKKGMQWVKTTEGLRDVINRHYPEITAKWMKSSSAFSVWDADY

SEQ ID NO: 49 - protein, 618 aa, Oryza meridionalis
MGSGLFKPRVHPDLRDVFSKMSFFDKIGFLFIHAFDKRNLWHKVPVPIGLLYLNTRRTLLEKYNLLAVGRSSHGALFDPKEFLYRTEDGKYNDPHNAEAGSQNTFFGRNMEPVDQKDELTSPDPFVVATKLLARREYKDTGKQFNILAAAWIQFMVHDWMDHMEDTGQIEITAPKEVANECPLKSFKFHPTKELPTNSDGIKIGHYNVRTAWWDGSAVYGNNEERAEKLRTYVDGKLVIGDDGLLLHKENGVALSGDIRNSWAGVSILQALFVKEHNAVCDAIKEEHPNLSDEELYRYAKLVTSAVVAKVHTIDWTVELLKTKTMRAAMRANWYGLLGKKIKETFGHIGGPILGGLVGLKKPNNHGVPYSLTEEFTSVYRMHSLIPSTLKLRDPTGQPDANHSPPYLEDIDIGELIGLKGEEQLSKIGFEKQALSMGYQACGALELWNYPSFFRNLIPQNLDGTNRSDRIDLAALEVYRDRERSVPRYNEFRRRLFLIPIKSWEDLTSDKDAIETIRAIYGDDVEKLDLLVGLMAEKKIKGFAISETAFNIFILMASRRLEADRFFTSNFNEETYTKEGMQWVKTTEGLRDVINRHYPEITAKWMKSSSAFSVWDADY

SEQ ID NO: 50 - protein, 569 aa, Oryza nivara
MGSGLFKPRVHPDLRDVFSKMSFFDKIGFLFIHAFDKRNLWHKVPVPIGLLYLNTRRTLLEKYNLLAVGRSSHGALFDPKEFLYRTEDGKYNDPHNAEAGSQNTFFGRNMEPVDQKDELMSPDPFVVATKLLARREYKDTGKQFNILAAAWIQFMVHDWMDHMEDTGQIEITAPKEVANECPLKSFKFHPTKELPTNSDGIKIVYGNNEERAEKLRTYVDGKLVIGDDGLLLHKENGVALSGDIRNSWAGVSILQALFVKEHNAVCDAIKEEHPNLSDEELYRYAKLVTSAVIAKVHTIDWTVELLKTKTMRAAMRANWYGLLGKKIKDTFGHIGGPILGGLVGLKKPNNHGIPYSLTEDIDIGEMTGLKGEEQLSKIGFEKQALSMGYQACGALELWNYPSFFRNLIPQNLDGTNRSDRIDLAALEVYRDRERSVPRYNEFRRRLFLIPIKSWEDLTSDKDAIETIRAIYGDDVEKLDLLVGLMAEKKIKGFAISETAFNIFILMASRRLEADRFFTSNFNEETYTKKGMQWVKTTEGLRDVINRHYPEITAKWMKSSSAFSVWDADY

SEQ ID NO: 51 - protein, 607 aa, Leersia perrieri
MGSGLFKPRVHPDLRDVFSKMSFFDKIGFLFIHAFDKRNLWHEMPVPIGLLYLNTRRTLLEKYNLLAVGRSSQGALFDPKEFLYRTGDGKYNDPHNAEAGSQNTFFGRNMKPVDQEDELMSPDPFVVATKLLARREYKDTGKQFNILAAAWIQFMVHDWMDHMEDTKQIEITAPKEVANECPLKSFKFYATKELPTNSDGIKIGHYNVRTAWWDGSAIYGNNDKKAEKLRTYVDGKLVIGDDGLLLPAENGVSLSGDIRNSWAGVSILQALFVKEHNAVCDAIKEEHPDLSDEQLYRYAKLVTSAVIAKVHTIDWTVELLKTKTMRAAMRANWYGLLGGPALGGLVGLKKPNNHGVPYSLTEEFTSVYRMHSLIPSTLKLRDPTGQPDANNSPPHLEDIDVGELIGLKGEEQLTKIGFEKQALSMGYQACGALELWNYPSFFRNLIPQNLDGTNRSDRIDLAALEVYRDRERSVPRYNEFRRRLFLIPIKSWEDLTSDKDAIEAIRAIYGDDVEKLDLLVGLMAEKKIKGFAISETAFNIFILMASRRLEADRFFTSNFNEKTYTKKGMHWVNTTEGLRDVINRHYPEITAKWMKSSSAFSVWDADY

SEQ ID NO: 52 - protein, 569 aa, Oryza glumipatula
MGSGLFKPRVHPDLRDVFSKMSFFDKIGFLFIHAFDKRNLWHKVPVPIGLLYLNTRRTLLEKYNLLAVGRSSHGALFDPKEFLYRTEDGKYNDPHNAEAGSQNTFFGRNMEPVDQKDELTSPDPFVVATKLLARREYKDTGKQFNILAAAWIQFMVHDWMDHMEDTGQIEITAPKEVANECPLKSFKFHPTKELPTNSDGIKIVYGNNEERAEKLRTYVDGKLVIGDDGLLLHKENGVALSGDIRNSWAGVSILQALFVKEHNAVCDAIKEEHPNLSDEELYRYAKLVTSAVIAKVHTIDWTVELLKTKTMRAAMRANWYGLLGKKIKETFGHIGGPILGGLVGLKKPNNHGVPYSLTEDIDIGEMIGLKGEEQLSKIGFEKQALSMGYQACGALELWNYPSFFRNLIPQNLDGTNRSDRIDLAALEVYRDRERSVPRYNEFRRRLFLIPIKSWEDLTSDKDAIETIRAIYGDDVEKLDLLVGLMAEKKIKGFAISETAFNIFILMASRRLEADRFFTSNFNEETYTKKGMQWVKTTEGLRDVINRHYPEITAKWMKSSSAFSVWDADY

SEQ ID NO: 53 - protein, 618 aa, Oryza sativa; identical to SEQ ID NO: 1

SEQ ID NO: 54 - protein, 617 aa, Panicum hallii
MGSGLFKPCVHPDLRDVFSKMSFGDKIGFLFIHAFDKRNLWHKMPVPIGLLYLNTRRTLLEKYDLLAVGSSHGALFDPKEFLYRTGDGKYNDPHNAEAGSQYTFFGRNMKPVDQVDELMRPDPFVVATKLLARREYKDTGKQFNILAAAWIQFMVHDWMDHMEDTKQIEITAPKEVANECPLKSFKFLATKELPTNSDGIKTGYYNGRTAWWDGSAIYGNNEKKAQKLRTYVDGKLVIRDDGLLLHEENGVPLSGDVRNNWTGVSILQALFIKEHNAVCDAIKEEHPNLSDEELYRYAKLVTSAVIAKVHTIDWTVELLKTKTMRAAMRANWYGLLGKKIKDTFGHIGGPALGGLVGLKKPNNHGVPYSLTEEFTSVYRMHPLIPSTLKLRDPTGQPDANNSPPYLEDIDIGELVGLKGEEQLSKIGFQKQTLSMGYQACGALELWNYPSFFRDLIPQNLDGTSRSDRIDLAALEVYRDRERSVPRYNEFRRRLFLIPIKSWEDLTSDKDAIEAIREIYGDDVEKLDLLVGLLAEKKIKGFAISETAFNIFIVMASRRLEADRFFTSNFNEKTYTKKGMQWVKTTEGLRDVINRHYPEMTAKWMKSSSAFSVWDADY

SEQ ID NO: 55 - protein, 619 aa, Zea mays
MGSGLFKPCVHPDFRVVFSKMSFGDKIGFLFVHAFDKRNLWHKMPVLIGLLYLNTRRTLLEKYNLLAVGSSHGALIDPKDQFMYRTGDGKYNDPDNAEAGSQYTFFGRNMKPVDQEYELMSPDPFVVATKLLARREYKDTGKQFNILAAAWIQFMVHDWMDHMEDTKQIEITAPNEVANKCPLKSFKFYATKELPTNSDGTIKTGYYNVRTAWWDGSAIYGNNDKKAEKLRTYVDGKLVIGDDGLLLHEENGVALLGDVRNSWVGVSILQALFVKEHNAVCDAIKEEHPNLSDEELYRYARLVTSAVIAKVHTIDWTVELLKTKTMRAGMRANWYGLLGKKIKDTFGHIGGPALGGLVGLKKPINHGVPYSLTEEFTSVYRMHSLLPSTLKLRDPTGQPDANNSPPYLKDVDIGELVGLKGEGQLSKIGFEMEILSMGYQACGALELWNYPSFFRDLIPQNLDGTNRSDRIDLAALEVYRDRERSVPRYNEFRRRLFLIPIKCWEDLTSDKDAIEAIRAIYGDDVEKLDLLVGLMAEKKIKGFAISETAFNIFILMASRRLEADRFFTSNFNEKTYTKKGMQWVKTTEGLRDVINRHYPEISAKWMKSSSAFSVWDADY

SEQ ID NO: 56 - protein, 617 aa, Triticum aestivum
MGSGLFKPRVHPDLRDVFSKMSFGDKIGFLFIHAFDKRNLWHKMPVPIGLLYLNTRRTLLEKYNLLAVGSSHGALFDPKEFPYRTGDGKYNDHHNAEAGSQYTFFGRNMKPVDQQDELMSPDPFVVATKLLARGEYKDAEKQFNILAAAWVQFMVHDWMDHMEDTKQIEITAPKEVANECPLKSSKFYATKEQPTNSDGIKTGYYNVRTAWWDGSAVYGNNEKEAKKIRTYVGGKLVIGDDGLLLHEENGVPLSGDVRNGWVGVSILQALFVKEHNAVCDAIKEEHPKLSDEELYRYAKLVTSAVIAKIHTVDWTVEPLKTKTMGAAMRANWYGLLGKKIKDTFGHIGGTALGGLVGLKKPINHGVPYSLTEEFTSVYRMHSLIPSTLKLRDPTGQPAASNSPPYLEDIDIGELVGLKGEDQLSKIGFDKQTLSMGYQACGALELWNYPSFFRDLIPQNLDGTNRSDRIDLAALVVYRDRERSVPRYNEFRRRLLLIPIKSWEDLTSDKDAIEAIRAIYGDDVGKLDLLVGLMAEKKIKGFAISETAFNIFILMASRRLEADRFITSNFNEKTYTKKGMQWVKTTEGLRDVINRHYPEITANWMKSSSAFSVWDADY

SEQ ID NO: 57 - protein, 617 aa, Panicum hallii
MGSGLFKPCVHPDLRDVFSKMSFGDKIGFLFVHAFDKRNLWHKMPVPIGLLYLNTRRTLLEKYDLLAVGSSHGALFDPKEFLYRTGDGKYNDPHNAEAGSQYTFFGRNMKPVDQEDELMRPDPFVVATKLLARREYKDTGKQFNILAAAWIQFMVHDWMDHMEDTKQIEITAPKEVANECPLKSFKFLATKELPTNSDGIKTGYYNGRTAWWDGSAIYGNNEKKAQKLRTYVDGKLVIRDDGLLLHEENGVPLSGDVRNNWTGVSILQALFIKEHNAVCDAIKEEHPNLSDEELYRYAKLVTSAVIAKVHTIDWTVELLKTKTMRAAMRANWYGLLGKKIKDTFGHIGGPALGGLVGLKEPNNHGVPYSLTEEFTSVYRMHPLIPSTLKLRDPTGQPDANNSPPYLEDIDIGELVGLKGEEQLSKIGFQKQTLSMGYQACGALELWNYPSFFRDLIPQNLDGTSRSDRIDLAALEVYRDRERSVPRYNEFRRRLFLIPIKSWEDLTSDKDAIEAIREIYGDDVEKLDLLVGLLAEKKIKGFAISETAFNIFIVMASRRLEADRFFTSNFNEKTYTKKGMQWVKTTEGLRDVINRHYPEMTAKWMKSSSAFSVWDADY

SEQ ID NO: 58 - protein, 598 aa, Oryza sativa
MSFFDKIGFLFIHAFDKRNLWHKVPVPIGLLYLNTRRTLLEKYNLLAVGRSSHGALFDPKEFLYRTEDGKYNDPHNAEAGSQNTFFGRNMEPVDQQDELMSPDPFVVATKLLARREYKDTGKQFNILAAAWIQFMVHDWMDHMEDTGQIGITAPKEVANECPLKSFKFHPTKELPTNSDGIKIGHYNIRTAWWDGSAVYGNNEERAEKLRTYVDGKLVIGDDGLLLHKENGVALSGDIRNSWAGVSILQALFVKEHNAVCDAIKEEHPNLSDEELYRYAKLVTSAVIAKVHTIDWTVELLKTKTMRAAMRANWYGLLGKKIKDTFGHIGGPILGGLVGLKKPNNHGVPYSLTEEFTSVYRMHSLIPSTLKLRDPTGQPDANNSPPCLEDIDIGEMIGLKGEEQLSKIGFEKQALSMGYQACGALELWNYPSFFRNLIPQNLDGTNRSDRIDLAALEVYRDRERSVPRYNEFRRRLFLIPIKSWEDLTSDKDAIETIRAIYGDDVEKLDLLVGLMAEKKIKGFAISETAFNIFILMASRRLEADRFFTSNFNEETYTKKGMQWVKTTEGLRDVINRHYPEITAKWMKSSSAFSVWDADY

SEQ ID NO: 59 - protein, 632 aa, Alternaria alternata
MGVSSQSKPEPYTYTPGLPQRALIAVFHGVNNIIPWHKLPTWIGVLNVAAFRYELRQKNLHDVYPSPNDQGTLGCPHLSDEQYLHTRHSDGLFNDLSAPKMGCTGMRFGRNVPREHTAKPSEEELMTPNPRLISEQLLKRDNFKPATSLNLLAAAWIQFQVHDWFQHENSASETYTVPLPEGDKWSSPDGRMKIEQTQPDAVLDKTDKTAPAYRNVNTHWWDGSQIYGSTELRTTELRGQSKNGKLTVDTQKIATFLPRDSNGIPQTGFMTNWWLGLEMLHTLFVLEHNTICDALVTAYPSWSSERIFDTARLVNCALMAKIHTVEWTPAILAHPVLEISMNANWWGVLGERLYKLLGRVSATSEAISGIPGSSVEHHAAPYALTEEFVSVYRMHALIPDTIAFFNSRTGEHKTTHSIGDVAFEKARAPLENDGLDFSDVFYSFGVNYPGAITLNNTPDFLRDLHTPDGRHIDLSTIDVLRDRERGVPRYNAFRRLFHLAPMTSFLELTGGNKAVAEKLAVIYEDDIEKVDLLVGCLAEPLPAGFGFSDTAFRVFILMASRRLKSDRFIAGDWNEKTYSKVGMQWVQNGGMKDVLGRHFPELESVLAKSGNPFAPWAMKDASKKYEGKETNA

SEQ ID NO: 60 - protein, 626 aa, Paraphaeosphaeria sporulosa
MPSLQPDSANPYTPSLPKKALIFLFKGVNKFVPWHKLPTYIGVLNLAAYRYELRQHNLHDTYPSPSYQGSATSDPVPHEFAHTRNSDGLYNDTNQPKMGCVGMRFGRNVGRDHTKKPSEEELLSPNPRVVSEVLLKREGFKPATILNLLAAAWIQFQVHDWFMHTNSTTEKHDIKLPPGDTWSDSQMSVEATQADEILDDTDKKSPAYRNENTHWWDGSQIYGSSEARTKELRGLAKNGKLEVDEQKVVTYLPRDENGVPRTGFYTNWWLGLEMLHTLFVLEHNAICDDLAKEYPDWESERIFDTARLVNCALMAKIHTTEWTPAILGHPALQIAMNGNWWGVLGEKLYKLLGRVAPGESISGIPGSGAEQHGAPYSLTEEFVSVYRMHPLIPDNIAFFSAATGEHKKTYPIRGVAFGEARAPLTEQSLGFEDIFYSFGINFPGAVTVNNTPDFLRDLHTPEGRHVDMGTLDILRDRERGIPRYNKFRELFHMKPVASFLELTGGNTEVAAKLDKVYEGDVNKVDLLVGCLCEPLPKGFGFSDTAFRVFILMASRRLKSDRFIATDWNEDTYSKAGMHWVQYNGMKDVLTRHFPVLGESLKGIKNPFAPWTKIGKSGEYKGEETNA

SEQ ID NO: 61 - protein, 627 aa, Corynespora cassiicola
MARESLAKAPSWTPPLLEKALIAFYKGVNKLVPWHKLPTLIGVLNLSAYRAELRHKNLHDVYPTPEYQGTKDCPHMTDKEWLATRNSDGLFNSLERPKMGCIGMRFGRNVPREYTHKPSEEEMMTPSPRLVSNELLKRDKFKPATILNLLAAAWIQFQVHDWFMHENSTTEKYEVKLAEGDEWSGQKMEVEATLADKELDETDKKAPGYKNQNTHWWDGSQIYGNTEARTKELRGQAKNGKLEVDEQKCVTFLPRDKDGIPETGFNTNWWLGLEMLHTLFVLEHNAICDELVKSYPDWSSEKVFDTARLVNCALMAKIHTVEWTPAILAHPALEISMNANWWGLLGERIFKLFGNFTKNEGISGIPGSIAEQQNAPYSLTEEFVSVYRFHTLIPDNIAFFSANGGAHKTTYPIKDVVFDKARKPLYDEKLRFDDIFYSFGINYPGAVTLNNTPDFLRDLHTPEGRHIDLGTIDILRDRERGVPRYNQFRRLFHLPAATSFAELTGGNAEVAGRLEAIYGGDIEKVDLLVGCMCEPLPKGFGFSDTAFRVFILMASRRLKSDRFIATEWNEKTYSKAGMDWVQNSGMKDVLLRHFPVLGETLGKSKNPFAPWTKIGKSAEYKGEETNA

SEQ ID NO: 62 - protein, 632 aa, Stemphylium lycopersici
MAASTTTDPRIYAYTPSFAQRSLISIFKAVNKFIPWHKLPTYIGVLNAAALRYELRQKNLYDVYPSSSDQGTPNRPHLSDQQYLHTRHSDGLFNDLDAPKMGCTGMRFGRNVPREFTTKPSEEELMTPNPRLISESLMKRDTFKPATSLNLLAAAWIQFQVHDWFQHENSTTEKFNVALPEGDNWSSVDGRMAIEKTQADTPLNKADEIAPAYRNTNTHWWDGSQIYGSTEVRTAELRGKAKHGKLEVDEQKLATFLPRDADGIPQTGFMTNWWLGLEMLHTLFVLEHNAICDALLTSYPDWSAEKVFDTARLVNCALMAKIHTVEWTPAILAHPVLDISMNANWWGVLGERLYKLLGRVSKTSEALSGIPGSTVSHHAAPYSLTEEFVSVYRMHALIPDSIAFFSSRSGAHTTTTPIRDVAFERARTPLETGGLDFSDIFYSFGINYPGAITLKNTPSFLCDLHTPDGRHIDLGTIDILRDRERGVPRYNDFRRLFHLPPVADFLALTGGDVAVSQQISTLYDGDVEKVDLLVGCMAEPLPAGFGFSDTAFRVFILMASRRLKSDRFIAGDWSEETYSRVGLEWVQSGGMKTVLGRHFPGLEGVLRRSGNPFAPWTKLEGSMGYTGVETNA

SEQ ID NO: 63 - protein, 630 aa, Stagonospora sp.
MTRPTKPETFTYTPSLPQRLLVSVYKGINKFVPWHKLPTYIGVLNLEAYRYELRQQNLHDVYPSPEDQGTKRCPVMTDSQYLHSRHSDGLFNDLSAPKMGCTGMRFGRNVSREYTAKPSHEELMTPNPRLISQELLRRDKFKPATSLNLLAAAWIQFQVHDWFQHENSTTEKHSVPLPEGDTWTSPDGNMSIEATQADASLDSTDKVAPAYKNINTHWWDGSQIYGSSEARTAELRLGAKNGKLFVDTQKIVTFLPRDEAGIPQTGFNTNWWLGLEILHTLFVLEHNAICDALHTAYPDWSSEKLFNTARLANCALMAKIHTTEWTPAILAHPALKVSMSANWWGILGERLYKLLGRVSKTSEAISGIPGSGAQQHAAPYSLTEEFVSVYRMHALVPDSIAFFDASSGSHKNTYDIADVAFEKARRPFEHGEMSFSDVFYSFGINYPGAVTLNNMPAFLKDLHTPDGRHVDMGTIDILRDRERGVPRYNQFRRLFHMPPQKDFMTLTGGNREVAERLATLYENDIEKVDLLVGCLSEPLPQGFGFSDTAFRVFILMASRRLKSDRFIAGDWNTETYSEVGMKWVQNSGMKEVLGRHFPELGDVLGKSENPFAPWSMKEGSREYKGQETNA

SEQ ID NO: 64 - protein, 630 aa, Pyrenochaeta sp.
MSPSTKAEAKPYTYTPGLPQRALIFVYKGINKLIPWHKLPTYIGVLNLSAYRYELRQKNLYDVYSSPEAQGTPGCPHMADEQYLHTRHSDGLFNDLAAPKMGCAGMRFGRNVPRNFTAKPSDEDILTPNPRIISQELLQRDSFKPATILNLLAAAWIQFQVHDWFQHSNSKTEKYDVPLPAGDQWAEGRMLIEKTEADAPESETDKIAPAYKNENTHWWDGSQIYGSSEARTKELRGQAINGKLEVDEQKLATYLPRDANGIPQTGFSTNWWLGLEMLHTLFVLEHNAVCDELVKNYPDWSSEKVFDTARLVTCALMAKIHTVEWTPAILAHPALKISMEANWWGVLGERLYKLLGRVSKTSEAISGIPGSGAEQHAAPYSLTEEFVSVYRMHALIPDTIAFFDAKTGAHKTTYPIQNVAFENARKPLEQGERSFENAFYSFGINYPGAVTLNNTPDFLRNLHTPDGRHIDLGTIDILRDRERGVPRYNAFRRLFHMPSVPSFLALTGNNAALAAKLEKLYEGDVEKVDLLVGCMCEPLPKGFGFSDTAFRVFILMASRRLKSDRFIAGDWNVETYSKVGMRWVQDSGMKDVLGRHFPALKDTLDKSQNPFAPWTKLEGSRGYGGKETNA

SEQ ID NO: 65 - protein, 632 aa, Alternaria tenuissima
MGVSSQSKPEPYTYTPGLPQRALIAVFHGVNNIIPWHKLPTWIGVLNVAAFRYELRQKNLHDVYPSPNDQGTLGCPHLSDEQYLHTRHSDGLFNDLSAPKMGCTGMRFGRNVPREHTAKPSEEELMTPNPRLISEQLLKRDNFKPATNLNLLAAAWIQFQVHDWFQHENSASETYTVPLPEGDKWSSPDGRMKIEQTQPDAALDKTDKTAPAYRNVNTHWWDGSQIYGSTELRTTELRGQSKNGKLTVDTQKIATFLPRDSNGIPQTGFMTNWWLGLEMLQTLFVLEHNTICDALVTAYPSWSSERIFDTARLVNCALMAKIHTVEWTPAILAHPVLEISMNANWWGVLGERLYKLLGRVSATSEAISGIPGSSVEHHAAPYALTEEFVSVYRMHALIPDTIAFFNSRTGEHKTTHSIGDVAFEKARAPLENDGLDFSDVFYSFGVNYPGAITLNNTPDFLRDLHTPDGRHIDLSTIDVLRDRERGVPRYNAFRRLFHLAPMTSFLELTGGNKAVAEKLAVIYEDDIEKVDLLVGCLAEPLPAGFGFSDTAFRVFILMASRRLKSDRFIAGDWNEKTYSKVGMQWVQNGGMKDVLGRHFPELESVLAKSGNPFAPWAMKDASKKYEGKETNA

SEQ ID NO: 66 - protein, 632 aa, Alternaria gaisen
MGVSSQSKPKPYTYTPGLPQRALIAVFHGVNNIIPWHKLPTWIGVLNVAAFRYELRQKNLHDVYPSPNDQGTLGCPHLSDEQYLHTRHSDGLFNDLSAPKMGCTGMRFGRNVPREHTAKPSEEELMTPNPRLISEQLLKRDNFKPATSLNLLAAAWIQFQVHDWFQHENSASETYNVPLPEGDKWSSPDGRMKIEQTQPDVALDQTDKTAPAYRNVNTHWWDGSQIYGSTELRTTELRGRSKNGKLTVDTQKIATFLPRDSNGIPQTGFMTNWWLGLEMLHTLFVLEHNTICDALVTAYPSWSSERIFDTARLVNCALMAKIHTVEWTPAILAHPVLEISMNANWWGVLGERLYKLLGRVSATSEAISGIPGSSVEHHAAPYALTEEFVSVYRMHALIPDTIAFFDSRTGEHNTTHSIGDVAFEKARAPLENDALDFSDVFYSFGVNYPGAITLNNTPDFLRDLHTPDGRHIDLSTIDVLRDRERGVPRYNAFRRLFHLAPMTSFLELTGGNKVVAEKLAVIYEDDIEKVDLLVGCLAEPLPAGFGFSDTAFRVFILMASRRLKSDRFIAGDWNEKTYSKVGMQWVQNGGMKDVLGRHFPELESVLAKSGNPFAPWTMKDASKKYEGKEINA

SEQ ID NO: 67 - protein, 632 aa, Alternaria tenuissima
MGVSSQSKPEPYTYTPGLPQRALIAVFHGVNNIIPWHKLPTWIGVLNVAAFRYELRQKNLHDVYPSPNDQGTLGCPHLSDEQYLHTRHSDGLFNDLSAPKMGCTGMRFGRNVPREHTAKPSEEELMTPNPRLISEQLLKRDNFKPATSLNLLAAAWIQFQVHDWFQHENSASETYTVPLPEGDKWSSPDGRMKIEQTQPDAALDKTDKTAPAYRNVNTHWWDGSQIYGSTELRTTELRGQSKNGKLTVDTQKIATFLPRDSNGIPQTGFMTNWWLGLEMLHTLFVLEHNTICDVLVTAYPSWSSERIFDTARLVNCALMAKIHTVEWTPAILAHPVLEISMNANWWGVLGERLYKLLGRVSATSEAISGIPGSSVEHHAAPYALTEEFVSVYRMHALIPDTIAFFNSRTGEHKTTHSIGDVAFEKARARLENDGLDFSDVFYSFGVNYPGAITLNNTPDFLRGLHTPDGRHIDLSTIDVLRDRERGVPRYNAFRRLFHLAPMTSFLELTGGNKAVAEKLAVIYEDDIEKVDLLVGCLAEPLPAGFGFSDTAFRVFILMASRRLKSDRFIAGDWNEKTYSKVGMQWVQNGGMKDVLGRHFPELESVLAKSGNPFAPWAMKDASKKYEGKETNA

SEQ ID NO: 68 - protein, 630 aa, Clohesyomyces aquaticus
MAPTVKPSDAPYKPSLFDRALIGFFKCVNRFVQWHKLPTYIGVANLDAYRKELRHKNLHDVYPGPEYQGTTGCPHMETTEYLATRNSDGLFNALDAPKMGCMGMRFGRNVPREFTKKPTLEEMMTPNPRLVSRELLARDTFKPATILNLLAAAWIQFQTHDWFFHENSETEKYEVPLPQGDSWSSPKMKIEATQADAPLDKTDEEAPAYANKNTHWWDGSQIYGNNEARTKELRGSAKNGKLVVDIENMETFLPRDSNGIPVTGFLANWWLGLELLHTLFVLEHNSICDELFLHYPDWSSEQLFDTARLVNCALMAKIHTVEWTPAILAHPTLDVSMHAQWWGVLGEKLYKLLGRVSPSEELSGIPGSLAEQHGAPFSLTEEFVSVYRLHSLIPDTIAFFSASTGVHTKTYPIADVAFTNARKPLTDTDSKLKFEDLFYSFGINYPGAVTLNNIPDFLRDLHTPEGRHIDLATIDILRDRERGVPRYNTFRRLFHMPPATSFLSLTGNNAPVAAKLAKIYNDDIEAVDLLVGCLSEPLPKGFGFSDTAFRVFILMASRRLKSDRFIATEWDEDVYSKVGLRWVQEGGFKQVLERHFPGLKGALRGVGNPFAPWGKVGRSGEYEGRETNAP

SEQ ID NO: 69 - protein, 632 aa, Alternaria tenuissima
MGVSSQSKPEPYTYTPGLPQRALIAVFHGVNNIIPWHKLPTWIGVLNVAAFRYELRQKNLHDVYPSPNDQGTLGCPHLSDEQYLHTRHSDGLFNDLSAPKMGCTGMRFGRNVPREHTAKPSEEELMTPNPRLISEQLLKRDNFKPATSLNLLAAAWIQFQVHDWFQHENSASETYTVPLPEGDKWSSPDGRMKIEQTQPDAVLDKTDKTAPAYRNVNTHWWDGSQIYGSTELRTTELRGQSKNGKLTVDTQKIATFLPRDSNGIPQTGFMTNWWLGLEMLHTLFVLEHNTICDALITAYPSWSSERIFDTARLVNCALMAKIHTVEWTPAILAHPVLEISMNANWWGVLGERLYKLLGRVSATSEAISGIPGSSVEHHAAPYALTEEFVSVYRMHALIPDTIAFFNSRTGEHKTTHSIGDVAFEKARAPLENDALDFSDVFYSFGVNYPGAITLNNTPDFLRDLHTPDGRHIDLSTIDVLRDRERGVPRYNAFRRLFHLAPMTSFLELTGGNKAVAEKLAVIYEDDIEKVDVLVGCLAEPLPAGFGFSDTAFRVFILMASRRLKSDRFIAGDWNEKTYSKVGMQWVQNGGMKDVLGRHFPELESVLAKSGNPFAPWAMKDASKKYEGKETNA

SEQ ID NO: 70 - protein, 632 aa, Alternaria alternata
MGVSSQSKPEPYTYTPGLPQRALIAVFHGVNNIIPWHKLPTWIGVLNVAAFRYELRQKNLHDVYPSPNDQGTLGCPHLSDEQYLHTRHSDGLFNDLSAPKMGCTGMRFGRNVPREHTAKPSEEELMTPNPRLISEQLLKRDNFKPATSLNLLAAAWIQFQVHDWFQHENSASETYTVPLPEGDKWSSPDGRMKIEQTQPDAALDKTDKTAPAYRNVNTHWWDGSQIYGSTELRTTELRGQSKNGKLTVDTQKIATFLPRDSNGIPQTGFMTNWWLGLEMLHTLFVLEHNTICDALVTAYPSWSSERIFDTARLVNCALMAKIHTVEWTPAILAHPVLEISMNANWWGVLGERLYKLLGRVSATSEAISGIPGSSVEHHAAPYALTEEFVSVYRMHALIPDTIAFFNSRTGEHKTTHSIGDVAFEKARAPLENDGLDFSDVFYSFGVNYPGAITLNNTPDFLRDLHTPDGRHIDLSTIDVLRDRERGVPRYNAFRRLFHLAPMTSFLELTGGNKAVAEKLAVIYEDDIEKVDLLVGCLAEPLPAGFGFSDTAFRVFILMASRRLKSDRFIAGDWNEKTYSKVGMQWVQNGGMKDVLGRHFPELESVLAKSGNPFAPWAMKDASKKYEGKETNA

SEQ ID NO: 71 - protein, 616 aa, Lactuca sativa
MSSAKSLLISPMEHFIHPDFHQIFQTMTLVNKFLFLIIHSVDKSGIGWHRLPVFLGLFYLAIRRRLHEEYNLMNVGKTPVGSRFNPSDFAFRSANGKFNDPLLLKPDPMVVATKLLARRELKDTGKQFNMIAASWIQFMIHDWIDHLESTQQIELKAPVEVANECPLTSIKFYKTKEVDTGLPDIKKGHRNIRTPWWDGSVVYGSNSKKMRQVRTFKDGKLKIEKDGLLQHNTDGLPIAGDVRNSWIGVSTLQALFILEHNAVCDALKKEYHYLEDEDLYRHARLVTSAVIAKIHTIDWTIELLKTDTLVAGMRANWYGLLGKRFKDTFGHVGGAILGGLVGLKEPVNHGVPYSLTEEFTSVYRMHSLLPDQLFIRDVNSKPGPNKSPKLSKTIDMINLIGKSGEKELLDIGFTTQMVSMGHQACGALELWNYPVWLRNIVPQNVDGTDRPDHIDLASLDIYRDRERNVARYNDFRRSLLLIPISKWDDLTDDIEAIDTLHDVYGDDVEQLDLLVGMAAEKKIKGFAISETAFIIFLIMASRRLEADRFFTSDFNEDVYTKKGFEWVNTTESLKDVLDRHYLGMTDRWMNSTSAFSVWDAAPESHNPIPIYFRVPN

SEQ ID NO: 72 - protein, 644 aa, Juglans regia
MFSAIMASIRALITEFFHLFIHRDFHEAVAKMTLIDRLLFLIVHFIDKLGIWHRLPVFLGLFYLGIRRHLHESYNLFNVGRSTVGVRFNPMDYPYRTADGKYNDPFNEGAGSEGTFFGRNILPVDQKKKLMKPDPMVVATKLLARRKFTDTGKQFNMIAASWIQFMIHDWIDHLEDTKQIELTAPKEVASQCPLKSFKFYKTKEVPTGFYEIKEGGLNIRTPWWDGSAIYGSNAERLQKVRTFKDGKLKIDSNTDLLLHDQDGTPVSGDVRNGWAGLSTLQALFIKEHNAVCDTLKKEYRDMDDEELYHRARLVTSAVIAKVHTIDWTVELLKTDTLRAGMRANWYGLLGKKFKDTFGHVGGVVLGGLVGLKKPNNHGVPYSLTEEFVSVYRMHGLLPDHLDLRDISASPGPNKSPPLMEKVPMANLIGHKGEKTLANIGFAKQMVSMGHQACGALELWNYPTWLRDVIPHDVDGHDRPDHVDLPALEVYRDRERSVARYNEFRRTLLLIPISKWEDLTDDEEAIRDLEEVYGDDVEELDLLVGLMAEKKITGFAISETAFVIFLLMASRRLEADRFFTSNFNEETYTKKGFEWVNTTESLKDVLERHYPELIKKWMNSTSAFTVWDSPPESHNPIPIYLRVPQ

SEQ ID NO: 73 - protein, 641 aa, Morus notabilis
MAVLSLIRDLWNKILHGYVHPDFHAAITKMSFIDVLVFLIVHSIDRLGIWHRLPVILGLAYLSLRRHLHQEYNLFNVGETPVGVRFNPTDYPYRTADGKYNDPFNEGAGGQGSFFGRNILPVDQKDKLLRPDPMVIATKLLARRNYKDTGKQFNVIAASWIQFMIHDWVNHLEDTNQIELTAPKEVANECPLKSFRFYQTKEVPTNFYEIKTGSKNIRTPWWDGSAIYGSNKERSTQLRTFKDGKLKISEDGLLLHDQDGIPLSGDVSNIWAGLSALQALFVKEHNAVCDALKKEYPHLDDEDLYRHARLVTSAVIAKVHTIDWTVELLKTDTLLAGMRGNWYGFLGKKFKDTFGHVGGSILGGLVGLKKPNNHGVPYSLTEEFVSVYRMHALLPDDLQVRDISVKSEPNKSPPLIKRIPMKNLIGQEGEKNISQIGFTRLFVSMGHQACGALELWNYPLWLRDLIPQDPNGRDRPDHVDLAALEVYRDRERSVARYNEFRRALLLIPIKKWEDLTDDDEAIKILKDVYGDDVEELDILVGLMAEKKIKGFAISETAFIIFLVMASRRLEADRFFTSYFNEETYTKKGFEWVNKTESLKDVIDRHYPKMTEKWMNSSSAFSVWDSPPTPPNPIPLYLRIPS

SEQ ID NO: 74 - protein, 644 aa, Juglans regia
MLSAIMASIRALITEPFHRLIHNDFHETVAKMTLVDRLLFLIIHFIDKLGIWHRLPVFLGLIYLAIRRRLHQEYNLFNVGRSPVGVRFNPMDYPYRTADGKYNDPFNEGAGSEGTFFGRNVLPVDQKKKLMKPDPMVVATKLLARRKFTDTGKQFNMIAASWIQFMIHDWIDHLEDTKQIELTAPREVANQCPLKSFKFYKTKEVPTDFYEIKEGALNIRTPWWDGSAIYGSNAERLQKVRTFKDGKLKIDSNTDLLLHDQDGTPVSGDVRNGWAGISTLQALFVKEHNAVCDTLKKEYRDLDDEELYHRARLVTSAVIAKVHTIDWTVELLKTNTLRAAMRANWYGLLGKKFKDTFGHVGGVILGGLVGLKKPNNHGVPYSLTEEFVSVYRMHSLLPDHLDLRDISVTPGPNKSPPLIEKVPMANLIGHKGEKTLADIGFAKQMVSMGHQACGALELWNYPTWLRDVIPQDVDGLDRPDHVDLPSLEVYRDRERSVARYNEFRRALLLIPISKWEDLTDDEEAIGELEEVYGDDVEELDLLVGLMAEKKIKGFAISETAFVIFLLMATRRLEADRFFTSNFNEETYTKKGLEWVNTTESLKDVIERHYPELIKKWMNSTSAFTVWDSPPESHNPIPLYLRVPQ

SEQ ID NO: 75 - protein, 639 aa, Arabidopsis thaliana
MKVITSLISSILLKFIHKDFHEIYARMSLLDRFLLLIVHGVDKMVPWHKLPVFLGLTYLEVRRHLHQQYNLLNVGQTPTGIRFDPANYPYRTADGKFNDPFNEGVGSQNSFFGRNCPPVDQKSKLRRPDPMVVATKLLGRKKFIDTGKQFNMIAASWIQFMIHDWIDHLEDTHQIELVAPKEVASKCPLSSFRFLKTKEVPTGFFEIKTGSQNIRTPWWDSSVIYGSNSKTLDRVRTYKDGKLKISEETGLLLHDEDGLAISGDIRNSWAGVSALQALFIKEHNAVCDALKDEDDDLEDEDLYRYARLVTSAVVAKIHTIDWTVQLLKTDTLLAGMRANWYGLLGKKFKDSFGHAGSSILGGVVGMKKPQNHGVPYSLTEDFTSVYRMHSLLPDQLHIRDIDDVPGTNKSLPLIQEISMRDLIGRKGEETMSHIGFTKLMVSMGHQASGALELMNYPMWLRDIVPHDPNGQARPDHVDLAALEIYRDRERSVPRYNEFRRSMFMIPITKWEDLTEDEEAIEVLDDVYDGDVEELDLLVGLMAEKKIKGFAISETAFYIFLIMATRRLEADRFFTSDFNETIYTKKGLEWVNTTESLKDVIDRHYPDMTDKWMNSESAFSVWDSPPLTKNPIPLYLRIPS

SEQ ID NO: 76 - protein, 638 aa, Camellia sinensis
MEPIKALLAETLHHFIHRDFHEVVARMTLIDKFLFLMIHSIDRLGIWSRLPVFLGLIYLAVRRHLHQEYNLINVGRTPVGVRSNPADFPFRTADGKFNDPFNETAGSQGTFFGRNIPPVDQNDKLLKPDPMVVATKLLARRTMKDNGKQFNMIAASWIQFMIHDWIDHLEDTNQIELTAPREVANQCPLQSFKFYKTKEVSTGFYGIKSGYLNIRTPWWDGSAIYGSNAERLGKVRTFKDGKLKISKDGLLLHDHDGTVVSGDVRNGWAGLSTLQALFVQEHNAVCDALKKEYHEMEDEELYRHARLVTSAVIAKIHTIDWTVELLKTDTLLASMRANWYGLLGKKFKETFGHIGGAILGGLVGLKKPENHGVPYSLTEEFVSVYRMHPLLPDHLLLRNINAAPGPDKSPPLIEKVPMPNLVGHKGEKALTEIGFTRQMVSMGHQSCGALELWNYPLWLREIIPQDVDGTDRTTPVDLPALEVYRDRERKVARYNEFRRGLLLIPISKWEDLTDDKEAIDTLKQVYGDDVENLDLLVGLMAEKKIKGFAISETAFIVFVIMASRRLEADRFFTNNFNEETYTKKGMEWVKKTESLKDVIDRHYPDMTNKWMNSTSAFTVWDAPPNPHNHIPLYLRIPQ

SEQ ID NO: 77 - protein, 643 aa, Phaseolus vulgaris
MWSLITDPIRTLFGNVLHHLIHKDFHEAVAKMTIIDAFLFIIVHSIDKVGIWPRLPVFLGLLYLAIRRHLHQEYNLFNVGTTPVGIRFNPSDFPYRTADGKYNDPFNEVAGSQGTFFGRNMLPVDQKKKVLKPDPMVVATKLLARRTYKDTGKQFNVIAASWIQFMIHDWIDHLEDTKQIELTAPREVASQCPLKSFKFFKTKEFPTGFYEIKSGSSNIRTPWWDASAVYGSNGEVLQKVRTFKDGKVKISKDGNLLHNENGTAIAGDIRNSWAGVSTLQSLFIQEHNAVCDSLKKNYPHLNDEELYRHARLVTSAVIAKVHTIDWTVELLKTDTLLAGMRANWYGLLGKKFKDTFGHVGGSILGGFVGMKKTENHGVTYSLTEEFVSVYRMHSLLPDNLQLRDISATPGPNKSPPVIKEIPMKNLIGLPGEKTLTDIGVARQLVSMGHQACGALELWNYPEWLRDLVPQNMDGTERSEHVDLAALEIYRDRERNVARYNQFRKALLLIPISKWEDLTDDKEAIEVLEEVYGDDVEELDLLVGLMAEKKIKGFAISETAFVIFLLMASRRLEADRFFTSNYNEETYTKKGLEWVNTTESLKDVIDRHYPKMTHKWLNSSSAFSVWDSLPNSHNPVPLYLRVPH

SEQ ID NO: 78 - protein, 632 aa, Handroanthus impetiginosus
MAFFSILLKPLQSFIHKDFHDVFQRMTLLDKFLFLVVHLVDKLGIWHKLPVFMGLTYLLIRRHLHQEYNLFNVGKKPVSVRSEPADFPFRTADGKFNDPFNEGAGCAGTFFGRNIPPFDQTHTLTRPDPMLVATKLLARKRFIDTGKQFNLIAASWIQFMIHDWVDHVEDFEHQIELRAPKEVASECPLKSFKFYKSKEIKTDNYGHNGIKSGYLNRRTPWWDGSAIYGNDKERQQKLRTFKDGKLKISGDGLLIVNEDGTVSSGDVRNIWAGLSALQALFVKEHNLICDALKKEYPKLEDEELYRHARLVTSAVIAKIHTIDWTVELLKTNMLLAGMRANWYGLLAKKIRDRFGHSGVTFLSGIVGSRKPVDHGVPYSLTEEFVSVYRMHPLLPDKLLLRNINGAPGPNKSAPLAKEIDMVELIGTKGSENMSKIGFTRLMVSMGHQACGALELWNYPMWLRSLISQNVDGTDRPDPVDLPSLEIYRDRERSVARYNDFRRALLLIPISKWEDLTDDKEAVETLSQVYGDDVEELDILVGLMAEKKIKGFAISETAFIIFLLMATRRLEADRFFTSDFNEEVYTKKGLEWVNTTESLKDVLNRHYPEMSSKWILRRSRKRHTLRRGLGLLE

SEQ ID NO: 79 - protein, 670 aa, Populus trichocarpa
MGRHVINRQGGFGDRSHLLANTVSKEAKMIRLTELIKKLSSASLRRFIHQDFHEVVDRMTIIDAFLFLIVHSIDKLGIWHRLPVFLGLLYLSVRRHLHQEYSLFNVGRSPTGVRYNPADYPYRTADGKYNEPFNEGAGSQGTFFGRNVLPVNQQDKLKKPDPMVVATRLLARKKFIDTGKQFNMIAASWIQFMIHDWVDHMEETAQIELVAPKEVANQCPLKSFRFYKTKEVPTGFWDIKSGALNIRTPWWDGSAIYGSNEKRLHKVRTFKDGKLKISEDGLLLHDQDGIAVSGDVRNSWAGVSILQALFVKEHNAVCDTLKREYKDLGDEELYRHARLVTSAVIAKVHTIDWTVELLKTDTLLAGMRGNWYGLLGKNFKDKFGHVGGAILGGVVGLKKPENHGVPYSLTEEFVSVYRMHSLLPDYLQLRDISAAPDSHKSPPSTDKIPMPSLIGRGGEKTLSGIGFIKLMVSMGHQASGALEPWNYPMWLRDVVAQDVDGMDRPDHVDLAALEVYRDRERNVARYNEFRRALLLIPISKWEDVTDDQEVIEALYEVYGDEVEELDLLVGLMAEKKIKGFAISETAFIIFLIMATRRLEADRFFTSNFNEETYTKKGFEWVNSTESLKDVLDRHYPEMTAKWMNSASAFSVWDSPPPSPNPIPLLFRVPK

SEQ ID NO: 80 - protein, 602 aa, Trifolium pratense
IVHSIDKLGIWHRLPVFLGLIYLNLRRHLHQQYNLINVGTAPVGIRYNPTDFPYRTADGRYNDPFNDGAGSQGTFFGRNVPPVDQKEKLLKPNPILVATKLLERKTYKDTGKQFNVIAASWLQFMVHDWIDHMEDTKQIELSAPREVASQCPMKSFKFYKIKEIPTGFYDIKTGAANIRTPWWDGSVIYGSNEEVLNKVRTFEDGKLKISKDGNLLQNEDGTAVSGDVRNSWAGVSTLQALFIQEHNAVCDALKKHYPDFEDEDLYRRARLVTSAVIAKVHILDWSVELIKTDILLAGFRSNWYGILGKKFKDTFGHLGVAILSGYAGMKRTENHGVPYSLTEDFSSVYRMHPLLPDSLHLRDISATPGPNKSPPLIKEIPMNDMIGLQGTKTLFEIGVAKQLVSMGHQSCGALELWNYPSWLRNLVPHNVDGTERSDHVDLAALEIYRDRENNLARYNQFRRGVLMIPISKWEDLTDDKETIKVLEEVYGDDVEELDLLVGLMAEKKIKGFAISETAFAIFIVMATRRLEADRFFTINFNEETYTKEGLEWVNTTESLKEVIDRHHPEMTDKWLNASSAFSVWDAPPNKPNSIPLYCRVPN

SEQ ID NO: 81 - protein, 508 aa, Populus trichocarpa
MVVATRLLARKKFIDTGKQFNMIAASWIQFMIHDWVDHMEETAQIELVAPKEVANQCPLKSFRFYKTKEVPTGFWDIKSGALNIRTPWWDGSAIYGSNEKRLHKVRTFKDGKLKISEDGLLLHDQDGIAVSGDVRNSWAGVSILQALFVKEHNAVCDTLKREYKDLGDEELYRHARLVTSAVIAKVHTIDWTVELLKTDTLLAGMRGNWYGLLGKNFKDKFGHVGGAILGGVVGLKKPENHGVPYSLTEEFVSVYRMHSLLPDYLQLRDISAAPDSHKSPPSTDKIPMPSLIGRGGEKTLSGIGFIKLMVSMGHQASGALEPWNYPMWLRDVVAQDVDGMDRPDHVDLAALEVYRDRERNVARYNEFRRALLLIPISKWEDVTDDQEVIEALYEVYGDEVEELDLLVGLMAEKKIKGFAISETAFIIFLIMATRRLEADRFFTSNFNEETYTKKGFEWVNSTESLKDVLDRHYPEMTAKWMNSASAFSVWDSPPPSPNPIPLLFRVPK

SEQ ID NO: 82 - protein, 641 aa, Lactuca sativa
MILSSAKSLLLSPIKHFIHGDFHDIYQRMTLIDRLLFLIIHGIDKIGIQWHRLPVFLGLIYLAIRRYLHDEYNLLNVGKTPVGVRFNAGDIPFRTADGKFNDPFNEDAGSEGTFFGRNMPPVDQKDKLLKPDPMVVATKLLARRQIIDTGKQFNMIAASWIQFMIHDWIDHLETTQQIELKAPPEVANQCPLKSFKFYKTKEVDTGFYDIKKGQLNIRTSWWDGSAIYGSNSSKLNQLRTFNEGKLKIGNDGLLQHDSDGVPLSGDVRNGWIGLSTLQALFILEHNAICDALKKEYQDLEDEDLYRHARLVTSAVIAKIHTIDWTVELLKTDMLHVAMRANWYGLLGKRFKDTFGHVGGAILGGLVGLKKPNNHGVPYSLTEEFVSVYRMHSLLPDQLFIRDVNSTPGPNKSPKLTKKVDMINLLGRRGEMELSEIGFTTQMVSMGHQACGALELWNYPTWLRDVVPQNVDGTDRSDHVDLPSLEIYRDRERNVARYNEFRRSLFLIPISKWEDLTDDKEAIDTLREVYNDDVEQLDMLVGMAAEKKIKGFAISETAFVIFIIMASRRLEADRFFTSDFNEDVYTKKGLEWVNTTESLKDVLDRHYPEMTDRWMNSASAFTVWDATPDPDNPIPIYFRVPK

SEQ ID NO: 83 - protein, 590 aa, Gossypium barbadense
MAFITKTLLNNILRRFIHQDFHEAVSSMTITDAFLFLMVHSVDKLGIWHRLPVILGLIYLAVRRHLHQQYNLINVGKTPSGVRFSPGDYPYRTADGSYNDPFNEGAGSQGSFFGRNIMPVHQTDKVELIAPKEVANKCPLSSFKFYPTREFPTGFYDIKSGAKNIRTPWWDGSVIYGSNKERLQKVRTFTDGKLKISEDGLLQQDEDGIPISGDIRNSWAGVSTLQALFIKEHNAVCDTLKKEYPDLNDEELYRYARLVTSAVIAKIHTIDWTVELLKTDMLLAGMRANWYGLLGKKFKDTFGHVGGSSLGGLVGLRKPVNHAVPYSLTEEFTSVYRLHQLLPDSIHLRNINVAPGPNKSPPLLEEVPMPESIGHKGENTLSQIGFTRQFVSMGHQACGALELWNYPSWLRDLVAQDVDGKDRPDHVDLAALEIYRDRERKVARYNQFRRALLLIPISKWEDLTEDKNAIEVLKDVYGDDVEELDLMVGLMAEKKIKGFAISETAFIVFLLMATRRLEADRFFTSDFNEETYTKKGFEWVNTTESLKDVLDRHYPEIPKKWINSTSAFSVWDSPPNAPNPIPLYLRFPTS

SEQ ID NO: 84 - protein, 643 aa, Gossypium barbadense
MQDVHRDSSHGRARVRGLLKKLVPGSENSTGKWHRLPVILGLIYLAVRRRLHQHYNLISVGKSPSGVRVNPGDYKYRTDDGSYGDPFNEGAGSQGTFFGRNIMPVDQTDKLKKPDPMVVATKLLTRAHYKDTGKQLNMIAASWIQFMIHDWVDHMENTNQQVELIAPKEVANKCPLTFKFYPTEEFSTSFDDVKTGAKNIRTHWWDGSVIYGSDKERLQKVRTLVDGKLKISEDGLLQQDEDGIPISGDIKNSWAGVSTLQALFIKEHNAICDALKKEYPALNDEELYRHARLITSAVIAKIHTIDWTVELLKTDTLLAGMRINWYGFLGKKFKDTFGHVGGSTLGGLVGLKKPINHGVPYTLTEEFTSVYRMHQLLPDSIHLRNINVTPGLNKSPPLLEEVPMPDLIGHKGEKTLSKIGFTRQFVSMGHQACGALELCNYPSWLRDLVAQDVDGKDRPDHVDLAALEVYRDRERKVARYNQFRRNLLLIPISKWEDLTEDKEAIEVLKEVYGDDIEELDLMVGLMAEKKIKGFAISETSFTVFLLMASRRLEADRFFTSDFNEEAYTKKGFEWVNTRKVSMQLGVTMKKSMPQRYYLGRSDEGMEGNSNFDTVQRRRRTLMKDSLGIREMETNLNSKDKDKV

SEQ ID NO: 85 - protein, 643 aa, Fagus sylvatica
MFSVIMASVRSLLTTILHQFIHKDFHEAVAKMTLIDAFLFFIVHSIDKLGIWPRLPVILGLLYLGIRRHLHSEYNLFNVGKSAVGVRFNPVDYPYRTADGKYNDPFNGGAGSEGTFFGRNILPVDQKDKLRKPDPMVVATKLLARKNFTDTGKQFNMIAASWIQFMIHDWIDHLEDTKQIELTAPREVASQCPLKSFKFYKTKEVPTGFYDIKTGALNTRTPWWDGSAIYGSNDEKLHKVRTFKDGKLKLSSDGLLLHDKDGIAVSGDVRNSWIGVSTLQVLFVKEHNAVCDTLKREYRDLDDEELYRHARLVTSAVIAKVHTIDWTVELLKTDMLLAGMRANWYGLLGKKFKDTFGHVGGAILGGLVGLKKPNNHGIPYSLTEEFVSVYRMHSLLPDYLNLRDISASPGPNKSPPLIEKVPLPNLIGRKGEKALVEFGFEKQMVSMGHQASGALELWNYPTWLRDLVPQDINGQDRPDHVDLPALEVYRDRERNVARYNEFRRSLLLIPISKWEDLTNDKEAVETLKEVYGDDVEELDLLVGLMVEKKIKGFAISETAFIIFLQMASRRLEADRFFTSNFNEETYTKKGLEWVNNTESLKDVLERHYPEIVKKWMNSTSAFSVWDSPPTSHNLIPLYLRVPQ

SEQ ID NO: 86 - protein, 648 aa, Populus alba
MFRLTELIKNLSGASLRRFIHQDFHEVVDRMTIIDAFLFLIVHSIDKLGIWHRLPVILGLLYLSVRRHLHQEYSLFNVGRSPTGVRYNPADYPYRTADGKYNEPFNEGAGSQGTFFGRNVLPVNQQDKLKKPDPMVVATRLLARKKFIDTGKQFNMIAASWIQFMIHDWVDHMEETEQIELVAPKEVANQCPLKSFRFYKTKEVPTGFWDIKSGALNIRTPWWDGSAIYGSNEKRLHKVRTFKDGKLKISEDGLLLLDQDGIAVSGDVRNSWAGVSILQALFVKEHNAVCDTLKREYKNLGDEELYRHARLVTSAVIAKVHTIDWTVELLKTDTLLAGMRGNWYGLLGKTFKDKFGHVGGAILGGVVGLKKPENHGVPYSLTEEFVSVYRMHSLLPDYLQLRDISAAPDSHKSPPSTDKIPMPSLIGRGGERTLSGIGFTKLMVSMGHQASGALEPWNYPMWLRDVVPQDVDGTDRPDHVDLAALEGICAGKVWEGAVRFVRFNNEFRRALLLIPISKWEDVTDDQEVIEALHQVYGDEVEELDLLVGLMAEKKIKGFAISETAFIIFLLMATRRLEADRFFTSNFNEETYTKKGFEWVNSTESLKDVLDRHYPEMTVKWMNSASAFSVWDSPPPSPNPIPLLFRVPK

SEQ ID NO: 87 - protein, 695 aa, Artemisia annua
MKLEKLMFLATGTAARDVRRECNFDQGDLAVVHLTNYSNIIDLDQSRSIPANMSIPFLSSADSLLLAQIKHFIHEDFHDILQRMSLTDKLLFMIIHGVDKTGIQWHKLPVFLGLIYLAIRRHLHSEYNLLNVGRTPVGVRFNPNDFPYRTADGTFNDPFNEGAGGEGTFFGRNMPPVDQKDKLLKPDPMVVATKLLARKQLIDTGKQFNVIAASWIQFMVHDWIDHLEETQQIELRAPPEVASECPLKSFKFYKTKEVDTGFHDIQKGGRNIRTPWWDGSAIYGSNSSKLQQLRTFKDGKLKIGKDGLLQHDNDGIPLSGDVRNGWIGLSTLQALFVLEHNMICDTLKKEYHDLEDEDLYRHARLVTSAVIAKIHTIDWTVELLKTDMLHVAMRANWYGLLGKKFKDTFGHVGGAIMGGLVGLKKPNNHGVPYSLTEEFVSVYRMHSLLPDQLFIRDVNSTPGPNKSLKVIKKIDMINLIGREGEEELSEIGFTRQMVSMGHQACGALELWNYPMWLRDVVPKNVDGTDRPDHVDLPSLEIYRDRERNVARYNEFRRSLFLIPITKWEDLTDDQEAIEALREVYDDNVEQLDLFVGMAAEKKIKGFAISETAFVIFIIMASRRLEADRFFTSDFNDEVYTKKGLEWVNTTESLKDVLDRHYPEMTDRWMNSPSAFMVWDAPPVPSNPIPIYFRVP

SEQ ID NO: 88 - protein, 687 aa, Artemisia annua
MIYRVNTIWMRQEKELIIHSVDRSRIQWHRLPVFLGLMYLAARRHLHRHYSLLFVGKTPASVGFNPADFPYRTPDGKFNDPADEVAGSSESFFGRNMLPLVDKKKILATMLIQIAIALLTPNPMVVATKLLARKQFIDTGKQLNLIAASWIQFMIHEWIDHLESSQEMELKASEEVANECPIQSFKFFKTKKVKTSLENINEGHLNIRTSWWDGSAIYGSNSSQLHQVRTYKEGKLKIANDGLLHHDENGLPITGDIRNGWIGVSTLQALFILEHNAVCDTLKKEYPDMDDENIFRHARLVTSAVIAKIHTIDWTVQLLKTDTLHAGMRANWYGLFGKKFKERYGHVGGPISGLVGLEKPNNYGVPYSLTEEFACVYRMHSLVPDQLLIRDINSPPGPNKSPMLRNKVDMVNLIGKRGEKELSEIGFMTQMVSMGHQACGALELWNYPVWLRDVVPQNVDGTDRSNNVDLASLEIYRDRERNVPRYNRFRRSLFLIPISKWDDLTDNKEAVDTLQEVYGDDVEQLDLLVGMLAEKKIKGFGISETAFIIFLLMASRRLEADRFFTSDYKEEVYTEKGMEWVNTTESLKDVLDRHYPQMTKQWMNSTSAFTVWDAPPDPNNQWYESIISLLIGLTVRSRNITVNEAHSRSGGGGGGGGRLEGGGGGGYGGRREEVVDMLVVTSVFGME

SEQ ID NO: 89 - protein, 644 aa, Artemisia annua
MKSFMHSAKSYLLTHIKKRFIHGDFHEIFDKMTLIDQLLFLIIHSLDKSGIAWHRLPVLLGLFYLGIRRRLHDKHNLINVGKTRVAVRFGADDVPFRTTNGMFNDLSDGAAGGQGTFFGRNMPPVDQKDKLLKPDPMVVATKLLARKELIDTGKQFNMIAASWIQFMIHDWIDHLESTKQIELTAPAGVASECPLKSFKFFETKEVDTGLYDIKKGHRNIRTPWWDGSVVYGSNTSQATHVRTFKDGKLKIAKDGLLQHDNNGLAISGDVRNSWIGVSTLQALFIHEHNAICDALMSEYPDMDDEDLYRHARLTTSAVIAKIHTIDWTIELLKTDTLVAGMRINWYGMLGKRFKDTFGHVGGAVLGGLVGLKKPDNHGVPYSLTEEFTSVYRMHSLLPDQLNIRDVNSAPGPNKSPKLTKKVDMINLIGKNGEKELSEIGFTAQMVSMGHQACGALELWNYPVWLRNIVPQNVDGTDRPDHVDLAALDIYRDRERNVARYNEFRRSILLIPISKWEDLTDDQEAVETLREVYGDDVEQLDLLVGMAAEKKIKGFAISETAFIIFLSMASRRLEADRFFTSDFNEDVYTKKGFEWVNTTESLKDVLDRHYPEMTDRWMNSTSAFSVWNAAPEPYNPVPIYFRLPK

SEQ ID NO: 90 - protein, 638 aa, Actinidia chinensis
MNCIMAALIAPFYGFIHKDFHEVVKKMTLSDKLLFLIMHFIDKMGIWHRLPVILGLVYLLIRRHLHQEYNLINVGKTPVGIRFNPVDYPYKTADEKYNDPFNETSSSKGTFFGRNILPVDQKDKLRKPDPMVVATKLLSRRKFIDTGKQFNIIATSWIQFMIHDWVDHLEDTNQIELSAPREVANQCPLQSFKFFKTKEVPTGFYEIKSGHLNIRTPWWDGSVIYGSNKERLGKVRTFQDGKLKISKDGLLLHDQDGIPVSGDTRNGWAGLSTLQALFVKEHNAVCDALKKEYPELDDEHLYRHARLVTSAVLAKIHTIDWTVELLKTDMLLAGMRGNWYGLLGKKFKDMFGHVGISLLSGLVGQKKPQNHGVPYSLTEEFTSVYRMHALLPDHLLLRDITATPGPNKSPPLSKEVPLSDLIGSKGEKTLSEIGFTRQMVSMGHQASGALELWNYPNSLRDLITQDEKGFDRPDHVDLAVLEVYRDRERNVARYNQFRRSLLLIPISKWEDLTDDVEAIGTLQEVYGDDVEELDLLVGLMAEKKIKGFAISETAFVIFLLMASRRLEADRFFTSDFNEETYTKKGFAWVNTTETLKDVIDRHYPEMTDKWMNSTSAFTVWDAPPETHNPIPLFLRVPT

SEQ ID NO: 91 - protein, 631 aa, Actinidia chinensis
MAALIATFYRFIHKDFHEVVKKMTLSDKLLFLIMHFIDKMGIWHWLPVILGLVYLLIRRHLHREYNLINVGNTPVGIRFNPVDYPYRTADGKYNDPFNETGTSEGTFFGRNILPVDQKDKPDPMVVATKLLSRRKFIDTGKQFNIIATSWIQFMIHDWVDHLEDTNQIELSAPREVANQCPLQSFKFFKTKEVPTGFYEIKSGHLNIRTPWWDGSVIYGSNKERLGKVRTFQDGKLKISKDGLLLHDQDGIPVSGDTRNGWAGLSTLQALFVKEHNAVCDALKKEYPELDDEQLYRHARLVTSAVLAKIHTIDWTVELLKTDMLFAGMRGNWYGLLGKKFKDMFGHVGISVLSGLVGQKKPQNHGVPYSLTEEFTSVYRMHALLPDHLLLRDITAAPGPNKSPPLSKEVPLSDLIGSKGEKTLSEIGFTRQMVSMGHQASGALKLWNYPNSLRDLITQDVNGFDRPDRVDLAALEVYRDRERNVARYNQFRRSLLLIPISKWKDLTDDVEAIRTFQEVYGDDVEELDLLVGLMAEKKIKGFAISETAFVIFLLMASRRLEADRFLTSDFNEETYTKKGFAWVNTTETLKDVIDRHYPEMTNKWMNSTSAFTVWDARPKCHNPIPLFLRIPI

SEQ ID NO: 92 - protein, 508 aa, Artemisia annua
MMVATKLLARKQFIDTRKQFNVIAASWIQFMIHDWIDHLESTKQIELKAPVGVASECPLKSFKFFETKEVDTELYDIKKGHRNIRTPWWDGSVVYGSNTSQASHVRTFKDGKLKIAEDGLLQHDNDGLAISGDVRNSWIGVSTLQALFIREHNAICDALLKEYPDMDDEDLYCHARLTTSAVIAKIHTIDWTVELLKTDTLVAGMRANWYGMLGKRFKDTFGHVGGVVLGGLVGLKKPDNHGVPYSLTEEFTSVYRMHSLLPDQLNIRDVNSAPGPNKSPKLTRKVDMINLIGKNGEKELTEIGFAAQMVSMGHQACGALELWNYPVWLRNIVPQNVDGTDRPDHVDLAALDIYRDRERNVARYNEFRRSILLIPISKWEDLTDDQEAIKTLREVYDDDVEQLDLLVGMAAEKKIKGFAISETAFIIFLIMATRRLKADRFFTSHFNEDVYTRKGFEWVNTTESLKDVLYRHYPEMTDRWLNSTSAFSVWDAEPEPYNPVPIYFRRPK

SEQ ID NO: 93 - protein, 630 aa, Artemisia annua
MIYRVNTIWMRQEKELIIHSVDRSRIQWHRLPVFLGLMYLAARRHLHRHYSLLFVGKTPASVGFNPADFPYRTPDGKFNDPADEVAGSSESFFGRNMLPLVDKKKILATMLIQIAIALLTPNPMVVATKLLARKQFIDTGKQLNLIAASWIQFMIHEWIDHLESSQEMELKASEEVANECPIQSFKFFKTKKVKTSLENINEGHLNIRTSWWDGSAIYGSNSSQLHQVRTYKEGKLKIANDGLLHHDENGLPITGDIRNGWIGVSTLQALFILEHNAVCDTLKKEYPDMDDENIFRHARLVTSAVIAKIHTIDWTVQLLKTDTLHAGMRANWYGLFGKKFKERYGHVGGPISGLVGLEKPNNYGVPYSLTEEFACVYRMHSLVPDQLLIRDINSPPGPNKSPMLRNKVDMVNLIGKRGEKELSEIGFMTQMVSMGHQACGALELWNYPVWLRDVVPQNVDGTDRSNNVDLASLEIYRDRERNVPRYNRFRRSLFLIPISKWDDLTDNKEAVDTLQEVYGDDVEQLDLLVGMLAEKKIKGFGISETAFIIFLLMASRRLEADRFFTSDYKEEVYTEKGMEWVNTTESLKDVLDRHYPQMTKQWMNSTSAFTVWDAPPDPSNLIPIYIRFPH

SEQ ID NO: 94 - protein, 644 aa, Artemisia annua
MKSFMHSAKSYLLTHIKKRFIHGDFHEIFDKMTLIDQLLFLIIHSLDKSGIAWHRLPVLLGLFYLGIRRRLHDKHNLINVGKTRVAVRFGADDVPFRTTNGMFNDPSDGAAGSQGTFFGRNMPPVDQKDKLLKPDPMVVATKLLARKELIDTGKQFNMIAASWIQFMIHDWIDHLESTKQIELTAPAGVASECPLKSFKFFETKEVDTGLYDIKKGHRNIRTPWWDGSVVYGSNTSQATHVRTFKDGKLKIAKDGLLQHDNNGLAISGDVRNSWIGVSTLQALFIHEHNAICDTLMSEYPDMDDEDLYRHARLTTSAVIAKIHTIDWTIELLKTDTLVAGMRINWYGMLGKRFKDTFGHVGGAVLGGLVGLKKPDNHGVPYSLTEEFTSVYRMHSLLPDQLNIRDVNSAPGPNKSPKLTKKVDMINLIGKNGEKELSEIGFTAQMVSMGHQACGALELWNYPVWLRNIVPQNVDGTDRPDHVDLASLDIYRDRERNVARYNEFRRSILLIPISKWEDLTDDQEAVETLREVYGDDVEQLDLLVGMAAEKKIKGFAISETAFIIFLSMASRRLEADRFFTSDFNEDVYTKKGFEWVNKTESLKDVLDRHYPEMTDRWMNSTSAFSVWDAAPEPYNPVPIYFRLPK

SEQ ID NO: 95 - protein, 590 aa, Jatropha curcas
MFTLLMSSLRSLLSSHLRRLIHEDFHAVVAKMTIIDTFLFLIVHSVDKLGLWPKLPVFLGLFYLAIRRHLHQEYNLLNVGRTPVGVRFNPADFPYRTADGQFNDPFNEAAGSQGTFFGRNMLPVVQKNKLTKPDPMVVATKLLARRKFIDTGKQFNMIAASWIQFMIHDWIDHLEDTNQIELTAPKEVASQCPLSSFKDGSAIYGSNAERLHKVRTFKDGKLKISENGLLLHDQDGIALSGDKEYPDLSDEELYRHARLVTSAVIAKIHTIDWTVELLKTDTLLAGMRANWYGLLGKKFKDTFGHVGGASLGGLVGLKKPENHGVPYSLTEEFVSVYRMHSLMPDHLALRDISTTPGSNKSLPLIKEIPMENLIGHKGEKVLEEIGFTKQMVSMGHQASGALELWNYPMWLRDVIPQDINGHDRPDRVDLPALEVYRDRERNVARYNEFRRSILLIPISKWEDLTDDEEAIQVLNEVYGDDVEELDLLVGLMAEKKIKGFAISETAFIIFLVMATRRLEADRFFTSNFNEETYTKKGFEWVNTTESLKDVLDRHYPEMTKKWMNSASAFSVWDSPPTAKNPIPIYFRVPK

SEQ ID NO: 96 - protein, 640 aa, Theobroma cacao
MAFFVSSIKSMLYRFIHEDFHEAVSKMTILDAFLFLIVHSVDKLGIWHRLPVFLGLFYLAIRRHLHQEYNLFNVGKSPSGVRFNPGDYPYRTADGRYNEPFNEAAGSQGSFFGRNILPVDQKDKLMKPDPMVVATKLLARRQYKDTDKQFNMIAASWIQFMIHDWVDHLEDTNQIELIAPKAVASKCPLSSFKFYETKWFPTCSYEIKTGTKNIRTPWWDGSAIYGSNAERLQKVRTFKDGKLKISESGLLVHDEDGIPIAGDVRNNWAGVSTLQALFIKEHNAVCDALKKEYPDLNDEELYRHARLVTSAVIAKIHTIDWTVELLKTDMLLAGMRANWYGLLGKKFKDTFGHVGNASLGGLVGQRKPVNHGVPYSLTEEFVSVYRMHPLLPDFLHLRNINVPPGPNKSPPLLEKVPMPDLVGHEGEKTLSQIGFTRQIVSMGHQACGALELWNYPSWLRDLVPQDVDGKDRPDHVDLAALEIYRDRERKVARYNQFRRALLLIPINRWEDLTDDKEAIETLEEVYGDDVEALDLMVGLMAEKKIKGFAISETAFIIFLLMATRRLEADRFFTSNFNEETYTKKGFEWVNSTESLKDVLERHYPDITKKWINASSTSAFSVWDSPPSAHSCIPLYLRLPS

SEQ ID NO: 97 - protein, 555 aa, Theobroma cacao
MGGSACCGVRKCRSLMQPTAMADLSVLVVQSSLHQLTKHTVYPFRPVKFNALMKPDPMVVATKLLARRQYKDTDKQFNMIAASWIQFMIHDWVDHLEDTNQIELIAPKAVASKCPLSSFKFYETKWFPTCSYEIKTGTKNIRTPWWDGSAIYGSNAERLQKVRTFKDGKLKISESGLLVHDEDGIPIAGDVRNNWAGVSTLQALFIKEHNAVCDALKKEYPDLNDEELYRHARLVTSAVIAKIHTIDWTVELLKTDMLLAGMRANWYGLLGKKFKDTFGHVGNASLGGLVGQRKPVNHGVPYSLTEEFVSVYRMHPLLPDFLHLRNINVPPGPNKSPPLLEKVPMPDLVGHEGEKTLSQIGFTRQIVSMGHQACGALELWNYPSWLRDLVPQDVDGKDRPDHVDLAALEIYRDRERKVARYNQFRRALLLIPINRWEDLTDDKEAIETLEEVYGDDVEALDLMVGLMAEKKIKGFAISETAFIIFLLMATRRLEADRFFTSNFNEETYTKKGFEWVNSTESLKDVLERHYPDITKKWINASSTSAFSVWDSPPSA

SEQ ID NO: 98 - protein, 640 aa, Brassica napus
MKVISSLISSVFLKFIPKDFHEVYSRMPVLDRIILLIVHAVDKMVPWHKLPVFLGMAYLGLRRHLHQEYNLINVGQTPVGTRFNPADYPYRTADGKFNDPFNEGVGSQYSFIGRNCPPVDQKTKLLKPDPMVVATKLLARRKLIDTGKQFNMIAASWIQFMIHDWVDHLEETNQIELVAPKEVANECPLSSFRFFKTKEVPTGFFEIKTGSLNSRTPWWDSSAIYGSNSKAMDRVRTYKDGKLKLSEETGLLLQDQDGLAISGDVRNSWVGVSALQALFVKEHNAVCDALKKEYDDLEDEDLYRHARLVTSAVIAKIHTIDWTVELLKTDTLLAGMRTNWYGILGKKFKDSFGHVGSSILGGLVGMKKPQNHGVPYSITEDFTSVYRMHSLLPDQLELRDIDVVPGTNKSLPLIEEVSFGKLLGPKGEQTMSHIGFTKLMVSMGHQASGALELMNYPVWLRDLVPHDPNGYDRPDHIDLAALEIYRDRERNVARYNEFRRSMFMIPIKKWEDLTDDKEAIEALEDVYGGNVEELDLLVGLMAEKKIKGFAISETAFNIFVLMATRRLEADRFFTSDFNEMTYTKKGLEWVNTTESLKDVFDRHYPEMTDRWMNSESAFSVWDSPPVAKNPIPLYLRVPSS

SEQ ID NO: 99 - protein, 640 aa, Brassica napus
MKVISSLISSVFLKFIHKDFHEVYSRMPVLDRIILLIVHAVDKMVPWHKLPVFLGMAYLGLRRHLHQEYNLINVGQTPVGTRFNPADYPYRTADGKFNDPFNEGVGSQYSFIGRNCPPVDQKTKLLKPDPMVVATKLLARRKLIDTGKQFNMIAASWIQFMIHDWVDHLEETNQIELVAPKEVANECPLSSFRFFKTKEVPTGFFEIKTGSLNSRTPWWDSSAIYGSNSKAMDRVRTYKDGKLKLSEETGLLLQDQDGLAISGDVRNSWVGVSALQALFIKEHNAVCDALKKEYDDLEDEDLYRHARLVTSAVIAKIHTIDWTVELLKTDTLLAGMRTNWYGILGKKFKDSFGHVGSSILGGLVGMKKPQNHGVPYSITEDFTSVYRMHSLLPDQLELRDIDVVPGTNKSLPLIEEVSFGKLLGPKGEQTMSHIGFTKLMVSMGHQASGALELMNYPLWLRDLVPHDPNGYDRPDHIDLAALEIYRDRERNVARYNEFRRSMFMIPIKKWEDLTDDKEAIEALEDVYGGNVDELDLLVGLMAEKKIKGFAISETAFNIFVLMATRRLEADRFFTSDFNEMTYTKKGLEWVNTTENLKEVFDRHYPEMTERWMNSESAFSVWDSPPVAKNPIPLYLRVPPS

SEQ ID NO: 100 - protein, 604 aa, Corchorus capsularis
MIVHSVDKLGIWHRLPVFLGLIYLAIRRHLHQEYNLLHVGKSPSGVRFNPGDYPYRTADGRYNEPFNEGAGSQGSFFGRNILPVPQNDKLMRPDPMVVATKLLARRNYKDTGKQFNMIAASWIQFMIHDWVDHMEDTNQIELIAPKEVASSCPLSSFKFYKTKEFPTGFYDIKSGTKNIRTPWWDGSVIYGSNNMRLEKVRTFIDGKLKIAKDGLLEHDKDGIPLSGDIRNSWAGVSTLQALFIKEHNAVCDALKEEYPELNDEELYHYGRLVTSAVIAKIHTIDWTVELLKTNTLLAGMRANWYGLLGKKFKDRFGHVGGSILGGLVGHRKTVNHGVPYSLTEEFVSVYRMHPLLPDSLDLRNTNVAPDQANKSPPLLEKIPMQDLIGHKGEKTLSGIGFIGQIVSMGHQACGALELWNYPSFLRDLITQDIDGKDRPDHVDLAALEIYRDRERKVARYNQFRRALLLIPISRWEDLTEDKEVSQSLNEVYGDNVEELDLLVGLMAEKKIKGFAISETAFVIFLLMATRRLEADRFFTSNFNEETYTKKGFEWVNKTESLKDVLDRHYPQITKKWMNSTSAFSVWDSPPNAPNFVPLYLRLPS

SEQ ID NO: 101 - protein, 631 aa, Corchorus olitorius
MASVISLFIHEDFHEVVSKMSITDAFLFLIVHSVDKLGIWHRLPVFLGLIYLAIRRHLHQEYNLLHVGKSPSGVRFNPGDYPYRTADGRYNEPFNEGAGSQGSFFGRNILPVPQNDKLIRPDPMVVATKLLARRNYKDTGKQFNMIAASWIQFMIHDWVDHMEDTNQIELIAPKEVASKCPLSSFKFYKTKEFPTGFYEIKSGTKNIRTPWWDGSVIYGSNIMRLEKVRTFIDGKLKIAKDGLLEHDKDGIPLSGDIRNSWAGVSTLQALFIKEHNAVCDALKEEYPELNDEELYHYGRLVTSAVIAKIHTIDWTVELLKTNTLLAGMRANWYGLLGKKFKDRFGHVGGSVLGGLVGHRKTVNHGVPYSLTEEFVSVYRMHPLLPDSLDLRNTNVAPEANKSPPLLEKIPMQDLIGHKGEKTLSGIGFIGQIVSMGHQACGALELWNYPSFLRDLITQDIDGKDRPDHVDLAALEIYRDRERKVARYNQFRRALLLIPISRWEDLTDDKEVIQTLNEVYADNVEELDLLVGLMAEKKIKGFAISETAFVVFLLMATRRLEADRFFTSNFNEETYTKKGFEWVNKTESLKDVLDRHYPQITKKWMNSSSAFSVWDSPPNAPNFIPLYLRLPS

SEQ ID NO: 102 - protein, 643 aa, Glycine max
MWSLVTDLIRALAARVIHQLIHKDFHEAVARMTIIDAFLFIIVHSIDKLGLWHRLPVFFGLLYLGIRRHLQQQYNLFNVGTTPVGIRFNPSDFPYRTDDGKYNDPFNEVAGSQGSFFGRNILPVDHKNKLLKPDPMVVATKLLARRTYKDTGKQFNVIAASWIQFMIHDWIDHLEDTNQIELIAPREVASQCPLKSFKFYKTKEIPTGFFEIKSGSSNIRTPWWDGSVIYGSNREVLEKVRTFKDGKIKISKDGHLLHNENGTAISGDVRNSWAGVSTLQALFTQEHNAVCDALKSNYPHLEDEEVYRHARLVTSAVIAKVHTIDWTVELLKTDTLLAAMHANWYGLLGKTFKDTFGHVGGAALGGLVGLKRPENHGVTYSLTEEFVSAYRIHSLLPDNLQLRDISATPGPNKSPPLIKEIPMKNLIGVQGEEALTKIGVERQLVSMGHQACGALELWNYPLWLRDLVPQNIDGTERKDHIDLAALEIYRDRERSVARYNQFRRALLLIPISKWEDLTDDQEAIQVLEEVYGDDIEELDLLVGLMAEKKIKGFAISETAFTIFIFMSSRRLEADRFFTSNFNEDAYTKKGLEWVNTTESLKNVIDRHYPEITHKWLNSSSVFSVWNSPPNTQNPIPLYLRVPH

SEQ ID NO: 103 - protein, 586 aa, Cucumis melo
MGVFKGLVLKFIHKDFHEVVRRMSAIDTFLFLIVHFVDKLGVWHKLPVILGLLYLATRRHLHQQYSLFNVGKAPPGGVRFNPKDYPYRTPDGKYNDPFNEDAGAQDTFFGRNIHPVDQSETEVELVAPREVANECPLKSFKFFPTKQVSTGVSDIKTGTINIRTPWWDGSVLYGSNAEMLGKVRTFEDGKLKIDDNGLLPHNTDGVAISGDVRNSWAGVSTLQALFIKEHNAVCDALKMEYKDMEDKDLYRHARLVTSAVIAKIHTIDWTVELLKTDTLLAGMRGNWYGLLGKKFKDVFGHVGGEILGGLVGLKKPNNHGVPYSLTEEFTSVYRMHPLLPEEFYFRDVYDDPDENKSPPLNRKVPMSDMIGHKGEETAKKMGFTALLVSMGHQASGALELFNYPLWLRDLIAQDMDGKDRPDHVDLAALEVYRDRERKVARYNDFRRGLFLIPISKWEDLTDNKEAIEVLREVYGDNVEELDILVGLLAEKKIKGFAISETAFVIFLLMASRRLEADSFFTCYFNEGAYTKRGLEWVNKTESLKDVIERHHPEISKKWMNSSSAFSVWDSPPNKPNKVPIYLRIPR

SEQ ID NO: 104 - protein, 607 aa, Glycine max
MWHTQIVHSIDKLGLWHRLPVFFGLLYLGIRRHLQQQYNLFNVGTTPVGIRFNPSDFPYRTDDGKYNDPFNEVAGSQGSFFGRNILPVDHKNKLLKPDPMVVATKLLARRTYKDTGKQFNVIAASWIQFMIHDWIDHLEDTNQIELIAPREVASQCPLKSFKFYKTKEIPTGFFEIKSGSSNIRTPWWDGSVIYGSNREVLEKVRTFKDGKIKISKDGHLLHNENGTAISGDVRNSWAGVSTLQALFTQEHNAVCDALKSNYPHLEDEEVYRHARLVTSAVIAKVHTIDWTVELLKTDTLLAAMHANWYGLLGKTFKDTFGHVGGAALGGLVGLKRPENHGVTYSLTEEFVSAYRIHSLLPDNLQLRDISATPGPNKSPPLIKEIPMKNLIGVQGEEALTKIGVERQLVSMGHQACGALELWNYPLWLRDLVPQNIDGTERKDHIDLAALEIYRDRERSVARYNQFRRALLLIPISKWEDLTDDQEAIQVLEEVYGDDIEELDLLVGLMAEKKIKGFAISETAFTIFIFMSSRRLEADRFFTSNFNEDAYTKKGLEWVNTTESLKNVIDRHYPEITHKWLNSSSVFSVWNSPPNTQNPIPLYLRVPH

SEQ ID NO: 105 - protein, 643 aa, Cucumis melo
MLSQLLKPIKIVLRGELQKFVHKDFHEVVERMTVIDTFLFLIIHFVDKLGIWHKLPVILGLLYLAVRRHLHQEYNLFNVGRTPVGVRFNPVDYPYRTADGKYNDPFNEGAGAQGSFFGRNIHPVDQSKTLLKPDPMVVATKLLARRKLIDTGKQFNMIAASWIQFMIHDWIDHLEDTKQVELVAPSEVASECPLKSFKFFKTKQVSTGFFENKTGSINVRTPWWDGSVLYGSNAEKLGKVRTYKDGKLKIADDDLLLHDNDGVAISGDVRNSWAGVSTLQALFIKEHNAVCDALKKEDENLEDEDLYRYARLVTSAVIAKVHTIDWTVELLKMDTLLAGMRGNWYGLLGKKFKDTFGHVGGAILGGLVGLKKPDNHGVPYSLTEEFASVYRMHSLLPDDFYLRDVSVDPDHDKSPPLVEKVPMSDMIGHKGEVTSKKMGFTALLVSMGHQASGALELWNYPLWLRDLIAHDMDGKDRPDHVDLAALEVYRDRERRVARYNDFRRGLFLIPISKWEDLTDDEEAIEVLREVYGDDVEELDILVGLMAEKKIKGFAISETAFVIFLIMASRRLEADRFFTSHFNEETYTKKGLEWVNTTESLKDVIERHYPEISNKWMNSSSAFSVWDSPPNKPNPIPIYLRIPH

SEQ ID NO: 106 - protein, 640 aa, Corchorus olitorius
MAMALLMSLFIHEDFHEVVSKMSIINAFLFLIVHSVDKLGIWHRLPVFLGVIYLAIRRYLHQEYNLLNIGNSPSGDRVNSGDNYHYRTAKGRCNEPLNEGASSQESFFGRNILPVPQNDKLMKPDPMVVATKLLARRNYKDTGKQLNIISASWIQFMIHDWVDHMEDTKQVELIAPKEVASKCPLTRFRFYKTKEFQTGFNEIKTVTKNIRTPWWDGSVIYGSDETSLEKVRTFIDGKLKIAEDGLLQHDKDGIPIVGDVRNSWAGVSTLQALFIKEHNAICDALKEEYPELTDEELYRYGKLVTSAVIAKIHTIDWTVELLKTDTLLAGMRVNWHGLLGKKFKDRFGHVGGALLGGLVGQRKTFNHGVPYSLTEEFVSLYRMHSLLPDSLHLRNTNVAPGANKSPPLLEKIPMQDLIGHKGEKTLSEIGFTGQIVSMGHQACGALELWNYPSWLRDLIIQDIDGKDRPDHVDLAALDIYRDRERKIARYNQFRRALLLIPISKWEDLTDDKEAIQTLNEVYGDDVEELDLLVGLMAEKKIKGFAISETAFVLFLLMASRRLEADKFFTSNFNEEKYTKKGFEWVNKTESLKDVLDRHYPQITKKWMNSSSAFSVWDSPPNASSFIPLYLRFPSSRSQQQ

SEQ ID NO: 107 - protein, 644 aa, Medicago truncatula
MWSTNPIRALFTRLMHHSIHKDFHEAVTKMSIFDAFLFYIVHSVDKMAIWPRLPVFLGLFYLFIRRHLHQRYNLIDVGKIHEGVRSSTSTHPYRTADGKYNDPFDDQAGSQGSFFGRNVLPVDQKNKLLKPDPMVVATKLLERREYKDTGKQFNVIAATWIQFMIHDWIDHLEDTNQIELTAPQEVASQCPLKSFKFLKTKEMPTGFDDIKTGHPNIRTPWWDGSVIYGSNDEILTQVRTSQDGKLKISKEGNHLLQNEDGVAISGDVRNSWAGVSTLQALFIQEHNAVCDALKKEYPYLEDEDLYRHARLVTSAVIAKIHTIDWTVELLKTDTLLAGMRANWYGLLGKKIKDKFGHFGGAILSGFVGMKKPKNHGVPYSLTEEFVSVYRMHQLLPNSLHLRDISDSSDPGHNKSPPFTEEIPMHELIGLQGEKKLTEIGVESTLVSMGHQACGALELWNYPSFLRDLVPHNVNGTERCDHVDLAALEIYRDRERNVPRYNQLRRGLLMIPISKWEDLTDDKEVIKVLEEVYGDDIEELDVQVGLMAEKKIKGFAISETAFTIFLLMASRRLEGDRFFTSYYNEETYTKKGLEWVNTTESLKDVIDRHHPQMTNKWMNSSSAFSVWDSPSIKHNPIPCYLRIPN

SEQ ID NO: 108 - protein, 640 aa, Arabis nemorensis
MEVISSLISSVLLKFIHKDFHEIYSRMSLLDRFLLLIVHAVDKVVPWHKLPVFLGLAYLGLRRHLHQEYNLINVGRTPVGTRFNPADYPYRTADGKFTDPFNEGVGSQFSFIGRNCPPVDQKIKLLKPDPMVVATKLLARRKMIDTGKQFNMIAASWIQFMIHDWVDHLEETDQIELVAPKEVANECPLNSFRFFKTKEVPTGFFDIKTGSLNTRTPWWDSSVIYGSNSKALERVRTYKDGKLKISEETGLLLHDNDCLAISGDVRNSWVGVSVLQALFIKEHNAVCDALKKEDMDLGDEDLYRYARLVTSAVIAKIHTIDWTVELLKTDTLLAGMRANWYGLLGKKFKDSFGHVGSSILGGIVGMKKTENHGVPYSLTEEFTSVYRMHSLLPDQLQMRDVDVVPGTNKSLPLIEEIPVEKLIGRKGEQTISHIGFTKLMVSMGHQACGALELMNYPQWFRDLVPQDPNGHDRPDHIDLAALEIYRDRERNVARYNDFRRAMFMIPITKWEDLTDDKEAIELLDDVYGGDVDELDLLVGLMAEKKIKGFAISETAFNIFLLMATRRLEADRFFTSDFNKTTYTKKGLEWVNTTETLKDVFDRHYPEMTDKWMNSESAFSVWDSPTATKNPIPLYLRIPSN

SEQ ID NO: 109 - protein, 643 aa, Medicago truncatula
MWSIITNPIKTIISNIIHHAIHKDFHAAVAKMSIIDAFLFLIVHSIDKLGIWHRLPVFLGLIYLAIRRHLHQEYNLINVGTTPVGVRSNPTDFPYRTADGRYNDPFNENAGSQGSFFGRNILPVDQKKKLLKPDPMVVATKLLERRTYKDTGKQFNVIAASWIQFMIHDWIDHMEDTQQIELIAPREVVNQCPLKSFKFFKTKEIPTGFYEVQTGHANIRTPWWDGSVIYGSNQEVLDKVRTFKDGKIKISKEGELLHNEDGTAISGDIRNSWAGVTTLQTLFVLEHNAVCDSLKKEYPDLEDEDLYRYARLVTSAVIAKIHTIDWTVELLKTDTLLGGMRANWYGLLGKKFKDTFGHSGNSILSGFVGMKRAENHGVPYSLTEEFASVYRMHPLLPDFLHLRDTSASPGPNKSPPLIKEIPMNDLIGLQGEKTLIEIGVQKQLVSMGHQACGALELWNYPSWLRNLVPHNMDGTERSDHVDLAALEIYRDRERGVARYNQFRRGLFMIPISKWEDLTDDKEVIKVLEEIYGDDVEELDVLVGLMAEKKIKGFAISETAFLIFLLMASRRLEGDRFFTSNYNEETYTEKGLKWVNTTETLKDVIDRHYPKMTNKWLNASSAFSVWDAPPNKHNPIPIYLRVPS

SEQ ID NO: 110 - protein, 621 aa, Medicago truncatula
MSSRYEYVYLYSAVKTQDYIIHSIDKLGLWHRLPVILGLLYLATRRHLHQQYNLFNVGQTAVGVRANPNDYPYRTADGKYNDPFNESAGSQGSFIGRNILPVDQKDKLLKPDPMVVATKLLERKTFKDNGKQFNVLAAAWIQFMIHDWIDHLEDTNQIELTAPREVASQCPLKSFKFLKTKEIPTGFYEIKTGHANIRTPWWDGSVIYGSNQEVLNKVRTFKDGKLKILDDGTLKQNENGVAISGDVRNSWAGVSTLQALFIQEHNAFCDALKNEYPDLEDEDLYRHARLVTSAVIAKIHTIDWTVELLKTDTLLAGMRANWYGLLGKKFKDTFGHVGDSILGGLVGMKKPDNHGVPYSLTEEFVTVYRMHALLPDSLHLRDISATPGQNKSPPLIKEIPMNDLIGLPGEKTLSSIGFSSTLVSMGHQTSGALTLGNYPSWLRDLVPQNIDGTERSDHVDMAALEIYRDRERKVAKYNQFRRSLLMIPISKWEDLTDDKEVIKVLEEVYGNDVEELDTLVGLMAEKKIKGFAISETSFVIFLIMASRRLEADRFFTSNFNEETYTKKGLEWVNTTESLKEVIDRHHPGMTQKWLNASSAFSVWDAPPNKFNPIPLYLRIPS

SEQ ID NO: 111 - protein, 613 aa, Coffea canephora
MTLVDKLLFLIIHFVDKLGIWHRLPVFLGLIYLSIRRHLHQEYNLFNVGKTPAGVRFNPADFPFRTADGEFNDPFNEGAGSEDSFFGRNVLPVDQRNKLLKPNPMVVATKLLARRNLKDTGKQFNMIAASWIQFMIHDWIDHLEDTQQIELTAPAEVASQCPLKSFKFYKTKEVPTGFYEIKTGHLNRRTPWWDGSAIYGSDEKSLKKVRTFKDGKLKISKDGLLLHEDDDGRAISGDVRNSWAGVSLLQALFVMEHNSVCDALKKEYPELGDEELYRHARLVTAAVIAKIHTIDWTVELLKTDTLHAAMRANWYGLLGKKFKDTFGHVGGAILSGLVGLKKPENHGVPYSLTEEFVSVYRMHSLLPDDLLLRDINAATGPNKSPPLSKQIAMPNLIGINGEKMLSGIGFTRQMVSMGHQACAALELWNYPLWLRDIIPQNPDGTERPDHVDLPALEIFRDRERSVARYNAFRRALLLIPISKWEDLTDDAESIKTLREVYGNDVEELDLLVGLMAEKKIKGFAISETAFIIFVIMATRRLEADRFFTSNFNEETYTKKGLERVNTTESLKDVLDRHYPEMTKKWMNSSSAFSVWDSAPNARNPIPLYLRVPQ

SEQ ID NO: 112 - protein, 508 aa, Medicago truncatula
MVVATKLLERRTYKDTGKQFNVIAASWIQFMIHDWIDHMEDTQQIELIAPREVVNQCPLKSFKFFKTKEIPTGFYEVQTGHANIRTPWWDGSVIYGSNQEVLDKVRTFKDGKIKISKEGELLHNEDGTAISGDIRNSWAGVTTLQTLFVLEHNAVCDSLKKEYPDLEDEDLYRYARLVTSAVIAKIHTIDWTVELLKTDTLLGGMRANWYGLLGKKFKDTFGHSGNSILSGFVGMKRAENHGVPYSLTEEFASVYRMHPLLPDFLHLRDTSASPGPNKSPPLIKEIPMNDLIGLQGEKTLIEIGVQKQLVSMGHQACGALELWNYPSWLRNLVPHNMDGTERSDHVDLAALEIYRDRERGVARYNQFRRGLFMIPISKWEDLTDDKEVIKVLEEIYGDDVEELDVLVGLMAEKKIKGFAISETAFLIFLLMASRRLEGDRFFTSNYNEETYTEKGLKWVNTTETLKDVIDRHYPKMTNKWLNASSAFSVWDAPPNKHNPIPIYLRVPS

SEQ ID NO: 113 - protein, 640 aa, Brassica campestris; identical to SEQ ID NO: 99

SEQ ID NO: 114 - protein, 621 aa, Gossypium mustelinum
MAFITMILFNNILGRFIHDDFHEAVSSMTITDAFLFLMVHWVDKVGKWHRLPVILGLIYLAVRRRLHQHYNLISVGKSPSGVRVNPGDYKYRTADGSYGDPFNEGAGSQGTSFGRNIMPVDQTDKLKKPDPMVVTTKLMTRTQYKDTGKQLNMIAASWIQFMIHDWVDHMENTNQQVELIAPKEVANKCPLTSFKFYPTKEFSTGFDDVKTGAKNIRTHWWDGSVIYGSDKERLQKVRTLVDGKLKISEDGLLQQDEDGIPISGDIKNSWAGVSTLQALFIKEHNAICDALKKEYPALNDEELYRHARLITSAVIAKIHTIDWTVELLKTDMLLAGMRINWYGFLGKKFKDTFGHVGGSTLGGLVGLKKPINHGVPYTLTEEFTSVYRMHQLLPDSIHLRNINVTPGLNKSPPLLEEVPMPDLIGHKREKTLSQIGFTRQFVSMGHQACGALELCNYPSWLQDLVAQDVDGKDRPDHVDLAALEVYRDRERKVARSEDKEAIEVLREVYGDDVEELDLMVGLMAEKKIKGFAISETSFIVFLLMASRRLEADRFFTSDFNEEAYTKKGFEWVNTTESLKDVLNRHYPEISKKWINSTSAFSVWDSPPNAPNPIPLYLRFPS

SEQ ID NO: 115 - protein, 643 aa, Nicotiana tabacum
MSLVMASLKNLLLSPLRGFIHKDFHDIFERMTLLDKLFFLIVHFVDKLNLWHRLPVFLGLLYLGARRHLHQEYNLINVGKTPVGVRSNPADHPYRTADGKYNDPFNEGAGSELSFFGRNMLPVHQHNQLKKPDPMVVATKLLARRNFVDTGKQFNMIAASWIQFMIHDWIDHLEDTKQIELKAPKEVASQCPLKSFKFFKTKEIPTGFYEIKTGHLNTRTPWWDGSSIYGSNAEVLKKVRTFKDGKLKLSADGLLEIDKNGKIISGDVRNTWAGLSALQALFVQEHNSVCDALKKEYPELEEEDLYRHARLVTSAVIAKVHTIDWTVELLKTDTMLAAMRTNWYGLLGKKFKDTFGHIGGSILGGFVGMKKPENHGVPYSLTEEFTSVYRMHQLLPDKLQLRNVDATPGPNKSLPLTNEIPMEDLIGGKGEENLSRIGFTKQMVSMGHQACGALELWNYPVWMRDLVAQNVDGTDRPDHVDLAALEIYRDRERSVARYNEFRRGMLQIPISKWEDLTDDEEVINTLREVYGDDVEELDLMVGMAAEKKIKGFAISETAFFIFLIMASRRLEADRFFTSNYKEETYTKKGLEWVNTTESLKDVLDRHYPEITEKWMNSSSAFSVWDSTPEPHNPIPLYFRVPPQ

SEQ ID NO: 116 - protein, 643 aa, Nicotiana tabacum
MSLVMDSLKNLLLSPLRGFIHKDFHDIFERMTLLSKLLFLIVHLVDKLNLWHRLPVLLGLLYLGARRHLHQEYNLINVGKTPIGVRSNPADHPYRTADGKYNDPFNEGAGSELSFFGRNMLPVDQHNQLKKPDPMVVATKLLARRNFVDTGKQFNMIAASWIQFMIHDWIDHLEDTKQIELKAAEEVASQCPLKSFKFFKTKEIPTGFYEIKTGHLNTRTPWWDGSAIYGSNAEVLKKVRTFKDGKLKLSADGLLEIDKNGKIISGDVRNTWAGLSALQALFVQEHNSVCDALKKEYPELEEEDLYRHARLVTSAVIAKVHTIDWTVELLKTDTLLAGMRANWYGLLGKKFKDTFGHVGGSILGGFVGMKKPENYGVPYSLTEEFTSVYRMHQLLPDKLQLRNIDATPGPNKSLPLTNEIPLEDLIGGKGEENLSKIGFTKQMVSMGHQACGALELWNYPVWMRDLIPQDVDGTDRPDHIDLAALEIYRDRERSVARYNEFRRGMLQIPISKWEDLTDDEEVINTLGEVYGDDVEELDLMVGMAAEKKIKGFAISETAFFIFLVMASRRLEADRFFTSNYNEETYTKKGLEWVNTTESLKDVLDRHYPEITEKWMNSSSAFSVWDSTPQPHNPIPLYFRVPPQ

SEQ ID NO: 117 - protein, 639 aa, Nicotiana tabacum
MDTLKNLLLSPLRRFIHKDFHEAVDRMALVDKFLFLIVHFIDKLNLWHRLPVFFGLLYLGARRRLHQEYNLINVGRTPTGVRSNPADYPYRTADGKYNDPFNEGAGSEFSFFGRNMLPVDHHNKLKKPDPMVVATKLLARKNFVDTGKQFNMIAASWIQFMVHDWIDHLEDTQQIELHAPKEVASQCPLKSFKFNKTKETSTNFYEIKTGHLNRRTPWWDGSVIYGSNAEVLKKVRTFKDGKLKISENELIQQDENGNIISGDVRNTWAGLLTLQALFVQEHNAVCDSLKKEYPELKDEDLYRHARLVTSAVIAKVHTIDWTVELLKTDTMLAGMRANWYGLLGKKFKDTFGHVGGSILSGFVGMKKPENYGVPYSLTEEFVCVYRMHQLLPDKLQLRNIDAKPGPNKSLPLTNEIPMEDLIGGKGKENLSRIGFTKQMVSMGHQACGALELWNYPVWMRDLVAQDVDGNDRPDHIDLAALEIYRDRERSVPRYNEFRRRMLQIPISKWEDLTDDVEAIKIFHEVYGDDVEELDLLVGLMAEKKIKGFAISETAFIIFLLMAARRLKADRFFTSNYKEETYTKKGLEWVNTTESLKDVLDRHYPEITEKWMNSSSAFSVWDSTPEPHNPIPLYFRIPQH

SEQ ID NO: 118 - protein, 641 aa, Gossypium mustelinum
MAFITKALFNNILRRFIHQDFHEAVSSMTIIDAFLFLMVHSVDRLGIWHRLPVVLGLIYLAVRRHLHQQYNLINVGETPSGVRFSPGDYPYRTADGSYNDPFNEGAGSQGSFFGRNIMPVHQTDKLMKPDPMVVATKLLTRTQYKDTDKQFNMIAASWIQFMIHDWIDHMENTNQQVELIAPKEVANKCPLSSFKFYPTKEFPTGFYDIKSGAKNIRTPWWDGSVIYGSNKERLQKVRTFTDGKLKISEDGLLQQDEDGIPISGDIRNSWAGVSTLQALFIKEHNAVCDTLKKEYPDLNDEELYRYARLVTSAVIAKIHTIDWTVELLKTDMLLAGMRANWYGLLGKKFKDTFGHVGGSSLGGLVGLRKPVNHGVPYSLTEEFTSVYRLHQLLPDSIHLRNINVAPGPNKSPPLLEEVPMPDLIGHKGEKTLSQIGFTRQFVSMGHQACGALELWNYPSWLRDLVAQDVDGKDRPDHVDLAALEIYRDRERKVARYNQFRRALLLIPISKWEDLTEDKNAIEVLKDVYGDDVEELDLMVGLMAEKKIKGFAISETAFIVFLLMATRRLEADRFFTSDFNEETYTKKGFEWVNTTESLKDVLDRHYPEISKKWMNSTSAFSVWDSPPNAPNPIPLYLRFPSS

SEQ ID NO: 119 - protein, 625 aa, Gossypium tomentosum
MQDVHRDSSHGRARVSLAATSSQEGACMNLVGTSLRAMSAKRTLSLVIGRCPLLVKCVATCPFRKWHRLPVILGLIYLAVRRRLHQHYNLISVGKSPSGVRVNPGDYKYRTDDGSYGDPFNEGAGSQGTFFGRNIMPVDQTDKLKKPDPMVVATKLLTRAHYKDTGKQLNMIAASWIQFMIHDWVDHMENTNQQVELIAPKEVANKCPLTFKFYPTEEFSTSFDDVKTGAKNIRTHWWDGSVIYGSDKERLQKVRTLVDRKLKISEDGLLQQDEDGIPISGDIKNSWAGVSTLQALFIKEHNAICDALKKEYPALNDEELYRHARLITSAVIAKIHTIDWTVELLKTDTLLAGMRINWYGFLGKKFKDTFGHVGGSTLGGLVGLKKPINHGVPYTLTEEFTSVYRMHQLLPDSIHLRNINVTPGLNKSPPLLEEVPMPDLIGHKGEKTLSKIGFTRQFVSMGHQACGALELCNYPSWLRDLVAQDVDGKDRPDHVDLAALEVYRDRERKVARYNQFRRNLLLIPISKWEDLTEDKEAIEVLKEVYGDDIEELDLMVGLMAEKKIKGFAISETSFIVFLLMASRRLEADRFFTSDFNEEAYTKKGFEWVNTSESLKDVLNRHYPEI

SEQ ID NO: 120 - protein, 643 aa, Cucumis sativus
MLSQLLKPIKIVLRGELQKFVHKDFHEVVQRMTVIDTFLFLIVHFVDKLGIWHKLPVILGLLYLAVRRHLHQEYNLFNVGRTPVGVRFNPVDFPYRTADGKYNDPFNEGAGAQGSFFGRNIHPVDQSKTLLKPDPMVVATKLLARRKLIDTGKQFNMIAASWIQFMIHDWIDHLEDTKQVELVAPREVASECPLKSFKFFKTKQVSTGFFDNKTGSINVRTPWWDGSVLYGSNAEKLGKVRTYKDGKLKIADDDLLLHDNDGVAISGDVRNSWAGVSTLQALFIREHNAVCDALKKEDEDLEDEDLYRYARLVTSAVIAKVHTIDWTVELLKMDTLLAGMRGNWYGLLGKKFKDTFGHVGGAILGGLVGLKKPDNHGVPYSLTEEFASVYRMHSLLPDDFHLRDISVDPDHNKSPPLVEKVPMANMIGHKGEETSKKMGFTALLVSMGHQSSGALELWNYPQWLRDLIPHDMDGKDRADHIDLAALEVYRDRERRVARYNDFRRGLFLIPISKWEDLTDDEGAIEVLREVYGDDVEELDILVGLMAEKKIKGFAISETAFVIFLIMASRRLEADRFFTSHFNEETYTKKGLEWVNTTESLKDVIERHYPEISNKWMNSSSAFSVWDSPPNKPNPIPIYFRLPH

SEQ ID NO: 121 - protein, 643 aa, Vigna radiata
  misc_feature (105)..(105): Xaa can be any naturally occurring amino acid
MWSVITDPIRNLFANVVHQFIHKDFHEAVAKMTIIDAFLFIIVHSIDKLGIWHRLPVFLGLLYLAIRRHLHQEYNLFNVGTTPTGIRFNHSDFPYRTADGKYNDXFNEVAGSQGTFFGRNMLPVDQKKKLLKPDPMVVATKLLARRTYKDTGKQFNVIAASWIQFMIHDWIDHLEDTKQIELTAPKEVAGQCPLKSFKFFKTKEIPTGFYEIKTGSSNIRTPWWDASAVYGSNGEVLQKVRTFKDGKLKISKDGNLLHNENGTAVAGDIRNSWAGVSTLQSLFIQEHNAVCDSLKKYYPQLNDEELYRHARLVISAVIAKVHTIDWTVELLKTDTLLAGMRANWYGLLGKKFKDTFGHVGGSILGGFVGMKKPENHGVTYSLTEEFTSVYRMHPLLPDNLHLRDISATPGPNKSPPVIKEIPMKNLIGLPGEKTLSEIGVARQLVSMGHQACGALELWNYPEWLRDLVPQNMDGTERSEHVDLAALEIYRDRERNVARYNQFRRSLLLIPISKWEDLTDDKEAIKVLEEVYGDDVEELDLLVGLMAEKKIKGFAISETAFVIFLLMASRRLEADRFFTSNYNEETYTKKGLEWVNTTESLKDVIDRHYPEMTHKWLNSSSAFSVWDSLPNSPNHVPLYLRVPH

SEQ ID NO: 122 - protein, 642 aa, Medicago truncatula
MWSIITNPIKTIISNIIHHAIHKDFHAAVAKMSIIDAFLFLIVHSIDKLGIWHRLPVFLGLIYLAIRRHLHQEYNLINVGTTPVGVRSNPTDFPYRTADGRYNDPFNENAGSQGSFFGRNILPVDQKKKLLKPDPMVVATKLLERRTYKDTGKQFNVIAASWIQFMIHDWIDHMEDTQQIELIAPREVVNQCPLKSFKFFKTKEIPTGFYEVQTGHANIRTPWWDGSVIYGSNQEVLDKVRTFKDGKIKISKEGELLHNEDGTAISGDIRNSWAGVTTLQTLFVLEHNAVCDSLKEYPDLEDEDLYRYARLVTSAVIAKIHTIDWTVELLKTDTLLGGMRANWYGLLGKKFKDTFGHSGNSILSGFVGMKRAENHGVPYSLTEEFASVYRMHPLLPDFLHLRDTSASPGPNKSPPLIKEIPMNDLIGLQGEKTLIEIGVQKQLVSMGHQACGALELWNYPSWLRNLVPHNMDGTERSDHVDLAALEIYRDRERGVARYNQFRRGLFMIPISKWEDLTDDKEVIKVLEEIYGDDVEELDVLVGLMAEKKIKGFAISETAFLIFLLMASRRLEGDRFFTSNYNEETYTEKGLKWVNTTETLKDVIDRHYPKMTNKWLNASSAFSVWDAPPNKHNPIPIYLRVPS

SEQ ID NO: 123 - protein, 641 aa, Gossypium darwinii
MAFITKTLLNNILRRFIHQDFHEAVSSMTITDAFLFLMVHSVDKLGIWHRLPVILGLIYLAVRRHLHQQYNLINVGKTPSGVRFSPGDYPYRTADGSYNDPFNEGAGSQGSFFGRNIMPVHQTDKLMKPDPMVVATKLLTRTQYKDTDKQFNMIAASWIQFMIHDWIDHMENTNQKVELIAPKEVANKCPLSSFKFYPTREFPTGFYDIKSGAKNIRTPWWDGSVIYGSNKERLQKVRTFTDGKLKISEDGLLQQDEDGIPISGDIRNSWAGVSTLQALFIKEHNAVCDTLKKEYPDLNDEELYRYARLVTSAVIAKIHTIDWTVELLKTDMLLAGMRANWYGLLGKKFKDTFGHVGGSSLGGLVGLRKPVNHAVPYSLTEEFTSVYRLHQLLPDSIHLRNINVAPGPNKSPPLLEEVPMPESIGHKGENTLSQIGFTRQFVSMGHQACGALELWNYPSWLRDLVAQDVDGKDRPDHVDLAALEIYRDRERKVARYNQFRRALLLIPISKWEDLTEDKNAIEVLKDVYGDDVEELDLMVGLMAEKKIKGFAISETAFIVFLLMATRRLEADRFFTSDFNEETYTKKGFEWVNTTESLKDVLDRHYPEIPKKWINSTSAFSVWDSPPNAPNPIPLYLRFPTS

SEQ ID NO: 124 - protein, 636 aa, Cucumis sativus
MGVFKGLVLKLIHRDFHEVVRRMSMIDTFLFLIVHSVDKLGIWHKLPVILGLLYLATRRHLHQEYSLFNVGKAPPGGVRFNPKDFPYRTADGKYNDPFDEDAGAQDTFFGRNIHPVDQSKTLLKPDPMVVATKLLARRKLIDTGKQFNVIAASWIQFMIHDWMDHLEDTKQEVELVAPREVASECPLKSFKFFPTKQVPTGLSDIKTGSINIRTPWWDGSVLYGSNAEMLGKVRTFEDGKLKIDDDGLLPHYRDGVAISGDVRNSWAGVSTLQALFIKEHNAVCDALKKEYTNMGDNDLYRHARLVTSAVIAKIHTIDWTVELLKTDTLLAGMRGNWYGLLGKKFKDKFGHVGGEILGGLVGLKKPNNHGVPYSLTEEFTSVYRMHPLLPDDFYLRNVYADPDHNKSPPLSKKVPMSDMIGHKGEESTKKMGFTALLVSMGHQASGALELFNYPLWFRDLIPHDMDGEDRPDHVDLAALEVYRDRERKVARYNDFRRGLFLIPISKWEDLTDDKEAIEVLREVYDDNVEELDILVGLMAEKKIKGFAISETAFVIFLVMASRRLEADSFFTCYFNEGAYTKKGLEWVNTTESLKDVIERHEPEISKKWMNSSSAFSVWDSPPNKPNYVPIYLRIPH

SEQ ID NO: 125 - protein, 643 aa, Vigna radiata
MWSVITDPIRNLFANVLHQFVHKDFHEAVAKMTIIDAFLFIIVHSIDKLGIWPRLPVFLGLLYLAIRRHLHQEYNLFNVGTTPTGIRFSPSDFPYRTADGKYNDPFNEVAGSQGSFFGRNMLPVHQKKKLLKPDPMVVATKLLARRKYKETGKQFNVIGASWIQFMIHDWIDHLEDTKQIELTAPKEVASQCPLKSFKFFKTKEIRTEFYEIKSGSLNIRTPWWDASAVYGSNGEVLQKVRTFKDGKLKISKDGNLLHNENGTAVAGDVRNSWAGVSTLQSLFIKEHNAVCDSLKKYYPHLNDEELYRHARLVTSAVIAKVHTIDWTVELLKTDTLLAGMRVNWYGLLGKKFKDTFGHVGGSILGGFVGMKKQENHGVSYSLTEEFVSVYRMHSLLPDNLQLRDVSATPGPNKSPPVIKEIPMKNLIGLPGEKKLTEIGVARQLVSMGHQTCGALELWNYPEWLRDLVPQNIDGTERSEHVDMAALEIYRDRERNVARYNQFRRSLLLIPISKWEDLTDDKEAIKVLEEVYGDDVEELDLLVGLMAEKKIKGFAISETAFVIFLLMASRRLEADRFFTSNYNEETYTKKGLEWVNTTESLKDVIDRHYPEMTHKWLNSSSAFSVWDSLPNSPNHIPLYLRVPH

SEQ ID NO: 126 - protein, 615 aa, Medicago truncatula
MSSRYEYVYLYSAIIHSIDKLGLWHRLPVILGLLYLATRRHLHQQYNLFNVGQTAVGVRANPNDYPYRTADGKYNDPFNESAGSQGSFIGRNILPVDQKDKLLKPDPMVVATKLLERKTFKDNGKQFNVLAAAWIQFMIHDWIDHLEDTNQIELTAPREVASQCPLKSFKFLKTKEIPTGFYEIKTGHANIRTPWWDGSVIYGSNQEVLNKVRTFKDGKLKILDDGTLKQNENGVAISGDVRNSWAGVSTLQALFIQEHNAFCDALKNEYPDLEDEDLYRHARLVTSAVIAKIHTIDWTVELLKTDTLLAGMRANWYGLLGKKFKDTFGHVGDSILGGLVGMKKPDNHGVPYSLTEEFVTVYRMHALLPDSLHLRDISATPGQNKSPPLIKEIPMNDLIGLPGEKTLSSIGFSSTLVSMGHQTSGALTLGNYPSWLRDLVPQNIDGTERSDHVDMAALEIYRDRERKVAKYNQFRRSLLMIPISKWEDLTDDKEVIKVLEEVYGNDVEELDTLVGLMAEKKIKGFAISETSFVIFLIMASRRLEADRFFTSNFNEETYTKKGLEWVNTTESLKEVIDRHHPGMTQKWLNASSAFSVWDAPPNKFNPIPLYLRIPS

SEQ ID NO: 127 - protein, 640 aa, Gossypium tomentosum
MAFITKFLFNNILGRFIHDDFHEAVSSMTITDAFLFLMVHWVDKVGKWHRLPVILCLIYLAVRRRLHQHYNLISVGKSPSGVRVNPGDYKYRTADGSYGDPFNEGAGSQGTFFGRNIMPVDQTDKLKKPDPMVVTTKLMTRTQYKDTGKQLNMIAASWIQFMIHDWVDHMENTNQQVELIAPKEVANKCPLTSFKFYPTKEFSTGFDDVKTGAKNIRTHWWDGSVIYGSDKERLQKVRTLVDGKLKISEDGLLQQDEDGIPISGDIKNSWAGVSTLQALFIKEHNAICDALKKEYPALNDEELYRHARLITSAVIAKIHTIDWTVELLKTDMLLAGMRINWYGFLGKKFKDTFGHVGGSTLGGLVGLKKPINHGVPYTLTEEFTSVYRMHQLLPDSIHLRNINVTPGLNKSPPLLEEVPMPDLIGHKGEKNLSQIGFTRQFVSMGHQACGALELCNYPSWLQDLVAQDVDGKDRPDHVDLAALEVYRDRERKVARYNQFRRNLLLIPISKWEDLTEDKEAIEVLKEVYGDDVEELDLMVGLMAEKKIKGFAISETSFIVFLLMASRRLEADRFFTSDFNEEAYTKKGFEWVNTTESLKDVLNRHYPEISKKWINSTSAFSVWDSPPNAPNPIPLYLRFPS

SEQ ID NO: 128 - protein, 640 aa, Gossypium darwinii
MAFITKILFNNILGRFIHDDFHEAVSSMTITDAFLFLMVHWVDKVGKWHRLPVILGLIYLAVRRRLHQHYNLISVGKSPSGVRVNPGDYKYRTADGSYGDPFNEGAGSQGTFFGRNIMPVDQTDKLKKPDPMVVTTKLMTRTQYKDTGKQLNMIVASWIQFMIHDWVDHMENTNQQVELIAPKEVANKCPLTSFKFYPTKEFSTGFDDVKTGAKNIRTHWWDGSVIYGSDKERLQKVRTLVDGKLKISEDGLLQQDEDGIPISGDIKNSWAGVSTLQALFIKEHNAICDALKKEYPALNDEELYRHARLITSAVIAKIHTIDWTVELLKTDMLLAGMRINWYGFLGKKFKDTFGHVGGSTLGGLVGLKKPINHGVPYTLTEEFTSVYRMHQLLPDSIHLRNINVTPGLNKSPPLLEEVPMPDLIGHKGEKTLSQIGFTRQFVSMGHQACGALELCNYPSWLQDLVAQDVDGKDRPDHVDLAALEVYRDRERKVARYNQFRRNLLLIPISKWEDLTEDKEAIEVLKEVYGDDVEELDLMVGLMAEKKIKGFAISETSFIVFLLMASRRLEADRFFTSDFNEEAYTKKGFEWVNTTESLKDVLNRHYPEISKKWINSRSAFSVWDSPPNAPNPIPLYLRFPS

SEQ ID NO: 129 - protein, 645 aa, Cucumis sativus
MLSVLLKPIKAILLLLVRLFVHRDFHELARRMTVLDIYRFLIIHSIDKMGIWPKLPVLLGLLYLAARRHLHQRYSLYKVGKNTPVGVRSHPEDCPYRTPDGRYTDPFDDDAGSQGTFFGRNVHPVDQSERLLKPDPMVVATKLLARKKLIDTGKQFNVIAASWIQFMVHDWMDHLEDTKQVELVAPSDVAKSCPLKSFKFFKTKEESTDLFDIRTGSINIRTPWWDGSVLYGSNEQMLNKVRTYEDGKLKIADDGLLPHDKDGIAISGDVRNSWAGVSTLQALFIKEHNAVCDVLKKEYGNMEDEELYRRARLVTSAVIAKVHTIDWTVELLKTDTLLAGMRGNWYGLLGKKFKDTFGHVGGSILGGLVGLKKPNNHGVTYSLTEEFTSVYRMHQLLPDSFYLRDVTVDPDQHNKSPPLIEYVPMANMIGHKGEETSKKMGFTALLVSMGHQASGALELFNYPLWLRDLIAHDMDNKDRPDHIDLAALEVYRDRERRVARYNDFRRGLFLIPISKWEDLTDDKDTIKVLREVYDDDVEQLDILVGLMAEKKIKGFAISETAFVIFLIMASRRLEADSFFTCYYNEETYTKKGLEWVKTTESLKDVIERHHPEISKKWINSSSAFSVWDSPPNKPNHVPLYLRIPN

SEQ ID NO: 130 - protein, 643 aa, Vigna radiata
  misc_feature (105)..(105): Xaa can be any naturally occurring amino acid
MWSVITDPIRNLFANVVHQFIHKDFHEAVAKMTIIDAFLFIIVHSIDKLGIWHRLPVFLGLLYLAIRRHLHQEYNLFNVGTTPTGIRFNHSDFPYRTADGKYNDXFNEVAGSQGTFFGRNMLPVDQKKKLLKPDPMVVATKLLARRTYKDTGKQFNVIAASWIQFMIHDWIDHLEDTKQIELTAPKEVAGQCPLKSFKFFKTKEIPTGFYEIKTGSSNIRTPWWDASAVYGSNGEVLQKVRTFKDGKLNISKDGNLLHNENGTAVAGDIRNSWAGVSTLQSLFIQEHNAVCDSLKKYYPHLNDEELYRHARLVISAVIAKVHTIDWTVELLKTDTLHAGMRANWYGLLGKKFKDTFGHVGGSILGGFVGMKKPENHGVTYSLTEEFASVYRMHPLLPDNLHLRDLSATPGPNKSLPVIKEIPMKSLIGLPGEKTLSEIGVARQLVSMGHQACGALELWNYPEWLRDLVPQNIDGTERSEHVDLAALEIYRDRERNVARYNQFRRSLLLIPISKWEDLTDDKEAIKVLEEVYGDDVEELDLLVGLMAEKKIKGFAISETAFVIFLLMACRRLEADRFFTSNYNEETYTKKGLEWVNTTESLKDVIDRHYPEMTHKWLNSSSAFSVWDSLPNSPNHVPLYLRVPH

SEQ ID NO: 131 - protein, 636 aa, Cucumis melo
MGVFKGLVLKFIHKDFHEVVRRMSAIDTFLFLIVHFVDKLGVWHKLPVILGLLYLATRRHLHQQYSLFNVGKAPPGGVRFNPKDYPYRTPDGKYNDPFNEDAGAQDTFFGRNIHPVDQSETLLKPDPMVVATKLLARKKLIDTGKQFNVIAASWIQFMIHDWMDHLEETNQEVELVAPREVANECPLKSFKFFPTKQVSTGVSDIKTGTINIRTPWWDGSVLYGSNAEMLGKVRTFEDGKLKIDDNGLLPHNTDGVAISGDVRNSWAGVSTLQALFIKEHNAVCDALKMEYKDMEDKDLYRHARLVTSAVIAKIHTIDWTVELLKTDTLLAGMRGNWYGLLGKKFKDVFGHVGGEILGGLVGLKKPNNHGVPYSLTEEFTSVYRMHPLLPEEFYFRDVYDDPDENKSPPLNRKVPMSDMIGHKGEETAKKMGFTALLVSMGHQASGALELFNYPLWLRDLIAQDMDGKDRPDHVDLAALEVYRDRERKVARYNDFRRGLFLIPISKWEDLTDNKEAIEVLREVYGDNVEELDILVGLLAEKKIKGFAISETAFVIFLLMASRRLEADSFFTCYFNEGAYTKRGLEWVNKTESLKDVIERHHPEISKKWMNSSSAFSVWDSPPNKPNKVPIYLRIPR

SEQ ID NO: 132 - protein, 643 aa, Cucumis melo; identical to SEQ ID NO: 105

SEQ ID NO: 133 - protein, 666 aa, Gossypium darwinii
MHDHGYYKEYLYHPPPHPKKKKRKPRFSRKTMAFITKALFNNILRRFIHQDFHEAVSSMTIIDAFLFLMVHSVDRLGIWHRLPVVLGLIYLAVRRHLHQQYNLINVGETPSGVRFSPGDYPYRTADGSYNDPFNEGAGSQGSFFGRNIMPLMKPDPMVVATKLLTRTQYKDTDKQFNMIAASWIQFMIHDWIDHMENTNQQVELIAPKEVANKCPLSSFKFYPTKKFPTGFYDIKSGAKNIRTPWWDGSVIYGSNKERLQKVRTFTDGKLKISEDGLLQQDEDGIPISGDIRNSWAGVSTLQALFIKEHNAVCDTLKKEYPDLNDEELYRYARLVTSAVIAKIHTIDWTVELLKTDMLLAGMRANWYGLLGKKFKDTFGHVGGSSLGGLVGLRKPVNHGVPYSLTEEFTSVYRLHQLLPDSIHLRNINVAPGPNKSPPLLEEVPMPDLIGHKGEKTLSQIGFTRQFVSMGHQACGALELWNYPSWLRDLVAQDVDGKDRPDHVDLAALEIYRDRERKVARYNQFRRALLLIPISKWEDLTEDKNAIEVLKDVYGDDVEELDLMVGLMAEKKIKGFAISETAFIVFLLMATRRLEADRFFTSDFNEETYTKKGFEWVNTTESLKDVLDRHYPEISKKWMNSTSAFSVWDSPPNAPNPIPLYLRFPSS

SEQ ID NO: 134 - protein, 636 aa, Cicer arietinum
MGLIKSLFSRFILQDFHEAVDRMTTLHAFLFLIVHTVDKHDLWHRLPVFIGLIYLVIRRHLHQKYNLLNVGTKPKMFRSSNHHDHPYRTADGKYNDPFNDDAGSQGTFFGRNVHPVYQKDKLLKPDPMVVAAKLLERKTFKDTGKQFNVIAASWIQFMIHDWIDHLEDTKQIEVVAPEEVASQCPLKSFKFFKTKEIPTGLDDIRTGAANIRTPWWDGSVIYGNNQEVLNEVRTSIDGKLKISLKDGTLLHNEDGVAISGDVRNSWAGVSTLQSLFIQEHNLVCDTLKKHHPDLKDEEVYRYARLVTSAVIAKIHTIDWTVELLKTDTLLVGMRANWYGLLGKKFKDTFGHVGTSILSGYVGMKKPDNHGVPYSLTEEFVSVYRMHALLPDTLQLRDDSATPGYNKSPPIIKEIPLYDLIGLQGETTLEEIRVSRQLVSMGHQASGALELWNYPSVLRDLVPHNVDGTERFDHVDLAALEIYRDRERNVARYNQLRRGLLMIPIKKWEDLTDDKETIEVLEEVYGDDVEELDVLVGLMAEKKIKGFAISDTAFTIFLLMASRRLEGDRFFTTDFNEKTYTKEGLKWVNTTESLKDVIDRHYPEMTQKWMNSSSAFSVWDSRPNKHNPIPIYLRGHN

SEQ ID NO: 135 - protein, 643 aa, Cicer arietinum
MWSIVTDPIQLLVTRIKQHVIHEDFHEAVSKMSIIDAFLFLIVHSMDKLGLWHRLPVFIGLIYLAIRRHLHQQYNLFNVGTTPIGVRSNPVDFPYRTADGRYNDPFNDGAGSQGTFFGRNVLPVDQKKKLLKPDPMVVATKLLERRTYKDTGKQFNVIAASWIQFMIHDWIDHLEDTDQIELTAPREVASQCPLKSFKFLKTKEIPTGFYEIKTGGVNIRTPWWDGSVIYGSNEEVLKKVRTFKDGKLKISKQGNLHLNEDGTTISGDIRNSWAGVTTLQTLFVQEHNAVCDTLKNHHPDLKDEDLYRYARLVTSAVIAKIHTIDWTVELLKTDTLLAGMRANWYGLLGKKFKDTFGHVGNSILSGFVGMKKTENHGVPYSLTEEFVSVYRMHSLLPDTLHLRDISATPGHNKSPPLVKEIPMNDLIGLQGENTLREIGVARQLVSMGHQACGALELWNYPSWLRDLVPHNVDGTERSDHVDLAALEIYRDRERNVARYNQFRRGLLMIPISKWEDLTDDKEVIEVLEEVYGDDVEELDVLVGLMAEKKIKGFAISETAFTIFLLMASRRLEADRFFTSNFNEETYTKEGLEWVNTTETLKDVIDRHHPEITNNWLNSSSVFSVWDSPPNKHNPIPIYLRVPS

SEQ ID NO: 136 - protein, 643 aa, Capsicum annuum
MSFVLETLKNLLLSYLRNFIHKDFHATVERMTLIDKISFTMIHFVDTLKMWHRLPVFLGLFYLAIRRHLHQQYNLINVGRTPTGVRSNPADYPYRTADGKYNDPFNDASGSEFSFFGRNMMPVDQNNELTKPDPMVVATKLLARKKFIDTGKQFNMIAVAWIQFMIHDWIDHLEDTQQIELKAPEEVASECPLKSFKFYKSKKNSTGFYEIKTGHLNRRTPWWDGSVIYGSDEDVLKKVRTFKDGKLKLSADGLLEQDSNGKIISGDVRNPWAGLLALQALFVHEHNLVCDTLKKEYPELEDEDLYRHARLVTSAVIAKIHTIDWTVELIKTDTLLAGMRANWYGLLGKRFKDVFGHVGGSILGGIVGMKKPQNYGVPYSLTEEFTSVYRMHQLLPEKLQLRNVDAAPGPNKSLPLINEIPMEDLIRVKGEEHLSKVGFIKQMVSMGHQASGALELWNYPVWMRNLIAQDVDGTDRPDHVDLAALEIYRDRERNVARYNEFRRRMLQIPISKWEDLTDDEEAIKTLREVYGDNVEEMDLLVGMAAEKKLKGFAISETAFFIFLLMASRRLEADRFFTSNYNEETYTKKGLEWANTTESLKDVLDRHYPGMTEKWMNSNSAFSVWDSSPEPPNPIPIYFRIPKQ

SEQ ID NO: 137 - protein, 649 aa, Capsicum annuum
MTLVMLRNLLFSPLRGLIHKDFHEILDKMTLNDKISFLIVHVIDKHNLWHRLPVFFGLVYLGLRRHLNQEYNLINVGRTPTGVRSNPEDYPYRTADGKYNDPFNEGAGSEFSFFGRNMMPVDQRDKLKNPDPMVVATKLLARRNFLDTGKQFNMIAASWIQFMIHDWIDHLEDTQQIELTAPEEVASQCPLKSFKFYKSKETPTGFYEIQTGHLNRRTPWWDGSAVYGSNAEVLKKVRTYKDGKLKLSADGLLEQDENGKIISGDVRNTWAGLLALQALFVQEHNLVCDVLKVGLMKLQKEYPELEDEDLYRHARLVTSAVIAKVHSIDWTVELLKTDTLLAAMRTNWYGLLGKKIKDTFGHIGGGGVLGGLVGMKKPQNHGVPYSLTEEFVSVYRMHQLLPDTLQLRNIDATPGPNKSLPLTNEIPMKDLIGGKGEENLSRIGFTKQMVSMGHQACGALELWNYPIWMRDLIPEDVDGTDRSDHVDLAALEIYRDRERSVARYNEFRRRMLQIPISKWEDLTDDEEAIKTLHEVYGNDVEALDLLVGMAAEKKIKGFAISETAFVIFLLMASRRLEADRFFTSNYNEETYTKRGLKWVNTTETLKDVLDRHYPEMTKKWMNSTSAFSVWDSSSETHNPIPLYFRVPQH

SEQ ID NO: 138 - protein, 642 aa, Nelumbo nucifera
MTIVMASLKSLLGAPFHGFIHKDFHQVVARMTLLDKLLFLVIHFVDKLGIWHQLPVLLGLIYLGIRRHLHQQYNLLNVGVTPIGVRFNPADYPYRTADGRYNDPFNEGAGSQGTFFGRNIPPVDQKHKLKRPEPAVVATKLLARRNFKDTGKQFNMIAASWIQFMIHDWIDHLEDTNQIELTAPSEVASQCPLKSFKLYKTKEVPTGFYEIKSGHLNIRTPWWDGSAIYGSNAERLRKVRTFKDGKLKISDDGLLLHDEDGIAVSGDVRNSWAGVSALQALFVKEHNAVCDVLKKEYPELDDEDLYRYARLVTSAVIAKVHTIDWTVELLKTDTLLAGMRANWYGLLGKKFKDTFGHVGGGTLGGLVGMKKPENHGVPYSLTEEFTSVYRMHALLPDDLLLRDISVAPGPSKSPPLLKRIPMAKLVGLKGEETLSEIGFIRQMVSMGHQACGALELWNYPLWLRDLIPQDKDGKERPDHVDMPALEVYRDRERNVARYNEFRRSLLLIPISKWEDLTDDVEAIQTLRQVYGDDVEELDLIVGLMAEKKIKGFAISETAFIIFLLMASRRLEADRFFTSNYNEETYTRKGLEWVNRTESLRDVINRHYPEMTKKWMNSTSAFSVWDSPPQPHNVIPLYLRVPH

SEQ ID NO: 139 - protein, 628 aa, Wollemia nobilis
MALLSFITIMYPSYSKMTLIDKILFLIIHFVDRVYAWYKLPVFLGLFYLEIRRMLHQRYNLINVGQTPADIRYNPADYPYRTADGNYNDPFDSGAGSDLTFFGRNMMPSPQKDKLLRPDPMVVASKLLARKNMSDTGKQFNMLAASWIQFMIHDWIDHVEDTKQLTLTAPPGIAQQCPLKAFKFFESKKEPTGFYDIKEGYLNRRTAWWDGSAVYGNNAEQSRKVRTYKHGKLKLDRSGLLLHDNDGIAISGDIRNSWAGLSVLQELFVQEHNAICDMLKDHHRDMEDDDLYRHARLVTSAVIAKIHTIDWTVELLKMDTLLAGMRSNWYGLLGKKFKDKFGHTGSSILSGFVGMPKPENHGVPYSLTEEFVSVYRMHSLMPDNIIMRDINGIPLKNKIPPVREPVDMRKLIGIPGEKTLSEIGNETLIVSMGHQACGALTLWNYPIWMRNLVAQEPDGHARPDPVDLPALEIYRDRERSVPRYNEFRRKLLMVPISKWKDLTDDDKAIQVLQEVYGNDVENLDLLVGLMAEKKIKGYAISETAFVIFLLMASRRLEADRFFTSDFNEEVYTKEGLAWVNSTESLKDVLNRHYPQLVKIWMNSSSAFSVWSADPEPKRFIPLYLRVPR

SEQ ID NO: 140 - protein, 642 aa, Nelumbo nucifera
MSIVMASLKVILGAPFNGLIHKDFQQVVARMTLIDKLLFLIIHSIDKLGMWHQLPVFLGLIYLGIRRHLHQQYNLFNVGVTSVGVRFNPADYPYRTADGRYNDPFNEVAGSEGTFFGRNIPPVNQRLKLEQPEPAAVATKLLARRNFKDTGKQLNMIAASWIQFMIHDWIDHLEDTKQIELTAPSEVASQCPLKSFKFYKTKEVPTGFYEIKSGSLNTRTPWWDGSAVYGSNPEKLGKTRTFKDGKLKISDDGLLLHDEDGIAVSGDIRNSWAGVSALQALFVKEHNAVCDALMKEYPELDDEDLYRHARLVTSAVIAKVHTIDWTVELLKTDTLLAKMRANWYGLLGKKFKDTFGHVGGDILGGLVGMKKPENHGVPYCLTEEFTSVCRMHALLPDDLHLRDISVAPGPNKAPPVLLRIPMTNLIGHKGEEALSRIGFIRQMVSMGHQACGALELWNYPLWLRDLIPQDKDGKERPDHVDMPALEVYRDRERKVARYNEFRRSLLLIPISKWEDLTDDMEAIQTLRQVYGDDVEELDLIVGLMAEKKIKGFAISETAFTIFFMMASRRLEADRFFTSNYNEETYTRKGLEWVNKTESLRDVINRHYPEMTKKWMNSASAFSVWDSPPQPHNVIPLYLRVPH

SEQ ID NO: 141 - protein, 643 aa, Nicotiana sylvestris; identical to SEQ ID NO: 115

SEQ ID NO: 142 - protein, 645 aa, Vitis vinifera
  misc_feature (43)..(43): Xaa can be any naturally occurring amino acid
  misc_feature (369)..(369): Xaa can be any naturally occurring amino acid
MASLVSLLTAPLHHFIHEDFHEVVARMTLIDRFLFLVKPQPPXSYTPLISWAYGIGYLCSWVLFIWQFVDTFMSSTTCLTLEGTPRGVRYNPVDYPYRTADGEYNDPFNEGAGSQGTFFGRNILPVDQKDKLKKPDPMVVATKLLARKDFTDTGKQFNMIAASWIQFMIHDWIDHMEDTQQIELTAPREVASQCPLKSFKFYKTKEVATGFYDIKSGSLNIRTPWWDGSAIYGSNEKQLQRVRTFKDGKLKISEDGLLLHDQDMIPVSGDVRNSWAGVSTLQALFVKEHNAVCDALKKEYRHMNDEELYHRARLVTSAVIAKIHTIDWTVELLKTDTLLAGMRANWYGLLGKKFKDTFGHVGGTILGGXVGQKKPNNHGVPYSLTEEFTTVYRMHELLPDHLLLRDISAAPGLNKSPPLVKKLSMPNLIGHEGERALSEIGFARQMVSMGHQASGALQLWNYPVWLRDLIPQDVDGKDRSDHVDLPALEIYRDRERKVARYNQFRRALLLIPISKWEDLTDDSETIKILRELYGDDVEELDTHVGLMAEKKIKGFAISETAFVIFIVMASRRLGADRFFTSNFNEETYTKKGLEWVNTTESLKDVLDRHYPEMTEKWMNSSSAFSVWDSAPNAHNLVPLYLRVPH

SEQ ID NO: 143 - protein, 643 aa, Glycine soja
MWSAVTDPIRAFFANFLRHFIHKDFHEAVARMTIIDAFLFVIVHSIDKLGIWPRLPVFLGLLYLAIRRRLHQEYNLFNVGTTPVGVRFNHSDFPYRTADGKYNDPFNEVAGSHGTFFGRNILPVDQKKKLLKPDPMVVATKLLARRTYKDTGKQFNVIAASWIQFMIHDWIDHLEDTNQIELIAPREVARQCPLKSFKFYKTKEIPTGFFEIKSGSSNIRTPWWDASAVYGSNGEVLQRVRTFKDGKIKISKDGHLLHNENGTAIAGDIRNSWAGVSTLQALFIQEHNAVCDNLKKHYPQLGDEELYRHARLVTSAVIAKVHTIDWTVELLKTDTLLAGMRANWYGLLGKKFKDTFGHVGGVILGGLVGLKRPENHGVTYSLTEEFVTVYRMHSLLPDNLQLRDISATPGPNKSPPLVKEIPMKNLIGLQGEKTLSEIGVARQLVSMGHQACGALELWNYPEWLRDLVPQNIDGTDRPDHVDLAALEIYRDRERSVARYNQFRRALLLIPISKWEDLTDDKEAIQVLEEVYGDDVEELDVLVGLMAEKKIKGFAISETAFVIFLLMATRRLEADRFFTSNFNEETYTKKGLEWVNTTESLKDVIDRHYPEMSHKWLNSSSAFSVWDSPPNSQNHIPLYLRVPH

SEQ ID NO: 144 - protein, 612 aa, Gossypium mustelinum
MAFITKILVNNILGRFIHDDFHEAVSSMTITDAFLFLMVHWHYNLISVGKSPSGVRVNPGDYKYRTDDGSYGDPFNEGAGSQGTFFGRNIMPVDQTDKLKKPDPMVVATKLLTRAHYKDTGKQLNMIAASWIQFMIHDWVDHMENTNQQVELIAPKEVANKCPLTFKFYPTEEFSTSFDDVKTGAKNIRTHWWDGSVIYGSDKERLQKVRTLVDGKLKISEDGLLQQDEDGIPISGDIKNSWAGVSTLQALFIKEHNAICDALEKEYPALNDEELYRHARLITSAVIAKIHTIDWTVELLKTDTLLAGMRINWYGFLGKKFKDTFGHVGGSTLGGLVGLKKPINHGVPYTLTEEFTSVYRMHQLLTDSIHLRNINVTPGLNKSPPLLEEVPMPDLIGHKGEKTLSKIGFTRQFVSMGHQACGALELCNYPSWLRDLVAQDVDGKDRPDHVDLAALEVYRDRERKVARYNQFRRNLLLIPISKWEDLTEDKEAIEVLKEVYGDDIEELDLMVGLMAEKKIKGFAISETSFIVFLLMASRRLEADRFFTSDFNEEAYTKKGFEWVNTSESLKDVLNRHYPEISKKWINSTSAFSVWDSPPNAPNPIPLYLRFPS

SEQ ID NO: 145 - protein, 636 aa, Cucumis melo; identical to SEQ ID NO: 131

SEQ ID NO: 146 - protein, 639 aa, Arabidopsis lyrata
MKAITSLISSVLLKFIHEDFHEIYSRMSLLDRFLLLIVHAVDKMVPWHKLPVFLGLAYLEVRRHLHQEYNLINVGQSPVGTRFDPANYPYRTADGKFNDPFNEGVGSQNSFFGRNCPPVDQITKLLRPDPMVVASKLLGRRKFIDTGKQFNMIAASWIQFMIHDWIDHLEDTRQIELVAPKEVANKCPLSSFSFFKTKEVPTGFFEIKTGSLNIRTPWWDSSVIYGSNSKILDRVRTYKDGKLKISEETGLLLHDEDGLAISGDIRNSWVGVSALQALFIKEHNAVCDALKDEDKDLEDEDLYRYARLVTSAVIAKIHTIDWTVQLLKTDTLLAGMRANWYGLLGKKFKDSFGHAGSSILGGVVGMKKPQNHGVPYSLTEDFTSVYRMHSLLPDHLQMRDIDDVPGANKSLPLIKEISMGNLIGRKGEETMSQIGFTKLMVSMGHQASGALELMNYPMWLRDIVPQDPNGQDRPDHVDLAALEIYRDRERNVPRYNDFRRAMFMIPITKWEDLTDDEEAIKVLDDVYDGDVEELDLLVGLMAEKKIKGFAISETAFYIFIIMATRRLEADRFFTSDFNETIYSKKGLEWVNTTESLKDVFDRHYPEMTDKWMNSESAFSVWDSPPVTKNPIPLYLRIPS

SEQ ID NO: 147 - protein, 640 aa, Brassica oleracea
MKVISSLISSVFLKFIHKDFHEVYSRMPVLDRIILLIVHAVDTMVPWHKLPVFLGMAYLGLRRHLHQEYNLINVGQTPVGTRFNPADYPYRTADGKFNDPFNEGVGSQYSFIGRNCPPVDQKTKLLKPDPMVVATKLLARRKLIDTGKQFNMIAASWIQFMIHDWVDHLEETNQIELVAPKEVANECPLSSFRFFKTKEVPTGFFEIKTGSLNSRTPWWDSSVIYGSNSKAMDRVRTYKDGKLKLSEETGLLLQDQDGLAISGDVRNSWVGVSALQALFVKEHNAVCDALKKEYDDLEDEDLYRHARLVTSAVIAKIHTIDWTVELLKTDTLLAGMRTNWYGILGKKFKDSFGHVGSSILGGLVGMKKPQNHGVPYSITEDFTSVYRMHSLLPDQLELRDIDVVPGTNKSLPLIEEVSFGKLLGPKGEQTMSHIGFTKLMVSMGHQASGALELMNYPVWLRDLVPHDPNGYDRPDHIDLAALEIYRDRERNVARYNEFRRSMFMIPIKKWEDLTDDKEAIEALEDVYGGNVEELDLLVGLMAEKKIKGFAISETAFNIFVIMATRRLEADRFFTSDFNEMTYTKKGLEWVNTTESLRDVFDRHYPEMTDRWMNSESAFSVWDSPPVAKNPIPLYLRVPSS

SEQ ID NO: 148 - protein, 640 aa, Gossypium raimondii
MAFITKILFNNILGRFIHDDFHEAVSSMTITDAFLFLMVHWVDKVGKWHRLPVILGLIYLAVRRRLHQHYNLISVGKSPSGVRVNPGDYKYRTADGSYGDPFNEGARSQGTFFGRNIMPVDQTDKLKKPDPMVVTTKLMTRTQYKDTGKQLNMIAASWIQFMIHDWVDHMENTNQQVELIAPKEVANKCPLTSFKFYPTKEFSTGFDDVKTGAKNIRTHWWDGSVIYGSDKERLQKVRTLVDGKLKISEDGLLQQDEDGIPISGDIKNSWAGVSTLQALFIKEHNAICDALKKEYPALNDEELYRHARLITSAVIAKIHTIDWTVELLKTDMLLAGMRINWYGFLGKKFKDTFGHVGGSTLGGLVGLKKPINHGVPYTLTEEFTSVYRMHQLLPDSIHLRNINVTPGLNKSPPLLEEVPMPDLIGHKGEKTLSQIGFTRQFVSMGHQACGALELFNYPSWLQDLVAQDVDGKDRPDHVDLAALEVYRDRERKVARYNQFRRNLLLIPISKWEDLTEDKEAIEVLKEVYGDDVEELDLMVGLMAEKKIKGFAISETSFIVFLLMASRRLEADRFFTSDFNEEAYTKKGFEWVNTTESLKDVLNRHYPEISKKWINSTSAFSVWDSPPNAPNPIPLYFRFPS

SEQ ID NO: 149 - protein, 640 aa, Gossypium hirsutum
MAFITKFLFNNILGRFIHDDFHEAVSSMTITDAFLFLMVHWVDKVGKWHRLPVILGLIYLAVRRRLHQHYNLISVGKSPSGVRVNPGDYKYRTADGSYGDPFNEGAGSQGTFFGRNIMPVDQTDKLKKPDPMVVTTKLMTRTQYKDTGKQLNMIAASWIQFMIHDWVDHMENTNQQVELIAPKEVANKCPLTSFKFYPTKEFSTGFDDVKTGAKNIRTHWWDGSVIYGSDKERLQKVRTLVDGKLKISEDGLLQQDEDGIPISGDIKNSWAGVSTLQALFIKEHNAICDALKKEYPALNDEELYRHARLITSAVIAKIHTIDWTVELLKTDMLLAGMRINWYGFLGKKFKDTFGHVGGSTLGGLVGLKKPINHGVPYTLTEEFTSVYRMHQLLPDSIHLRNINVTPGLNKSPPLLEEVPMPDLIGHKGEKTLSQIGFTRQFVSMGHQACGALELCNYPSWLQDLVAQDVDGKDRPDHVDLAALEVYRDRERKVARYNQFRRNLLLIPISKWEDLTEDKEAIEVLKEVYGDDVEELDLMVGLMAEKKIKGFAISETSFIVFLLMASRRLEADRFFTSDFNEEAYTKKGFEWVNTTESLKDVLNRHYPEISKKWINSTSAFSVWDSPPNAPNPIPLYLRFPS

SEQ ID NO: 150 - protein, 692 aa, Gossypium hirsutum
MVSRHCRHYFSHNFFYKYGHMHDHGYYKEYLYHPPPHPKKKKRKPRFSRKTMAFITKALFNNILRRFIHQDFHEAVSSMTIIDAFLFLMVHSVDRLGIWHRLPVVLGLIYLAVRRHLHQQYNLINVGETPSGVRFSPGDYPYRTADGSYNDPFNEGAGSQGSFFGRNIMPVHQTDKLMKPDPMVVATKLLTRTQYKDTDKQFNMIAASWIQFMIHDWIDHMENTNQQVELIAPKEVANKCPLSSFKFYPTKEFPTGFYDIKSGAKNIRTPWWDGSVIYGSNKERLQKVRTFTDGKLKISEDGLLQQDEDGIPISGDIRNSWAGVSTLQALFIKEHNAVCDTLKKEYPDLNDEELYRYARLVTSAVIAKIHTIDWTVELLKTDMLLAGMRANWYGLLGKKFKDTFGHVGGSSLGGLVGLRKPVNHGVPYSLTEEFTSVYRLHQLLPDSIHLRNINVAPGPNKSPPLLEEVPMPDLIGHKGEKTLSQIGFTRQFVSMGHQACGALELWNYPSWLRDLVAQDIDGKDRPDHVDLAALEIYRDRERKVARYNQFRRALLLIPISKWKDLTEDKNAIEVLKDVYGDDVEELDLMVGLMAEKKIKGFAISETAFIVFLLMATRRLEADRFFTSDFNEETYTKKGFEWVNTTESLKDVLDRHYPEISKKWMNSTSAFSVWDSPPNAPNPIPLYLRFPSS

SEQ ID NO: 151 - protein, 642 aa, Capsicum annuum
MTLVMLRNLLFSPLRGLIHKDFHEILDKMTLNDKISFLIVHVIDKHNLWHRLPVFFGLVYLGLRRHLNQEYNLINVGRTPTGVRSNPEDYPYRTADGKYNDPFNEGAGSEFSFFGRNMMPVDQRDKLKNPDPMVVATKLLARRNFLDTGKQFNMIAASWIQFMIHDWIDHLEDTQQIELTAPEEVASQCPLKSFKFYKSKETPTGFYEIQTGHLNRRTPWWDGSAVYGSNAEVLKKVRTYKDGKLKLSADGLLEQDENGKIISGDVRNTWAGLLALQALFVQEHNLVCDVLKKEYPELEDEDLYRHARLVTSAVIAKVHSIDWTVELLKTDTLLAAMRTNWYGLLGKKIKDTFGHIGGGGVLGGLVGMKKPQNHGVPYSLTEEFVSVYRMHQLLPDTLQLRNIDATPGPNKSLPLTNEIPMKDLIGGKGEENLSRIGFTKQMVSMGHQACGALELWNYPIWMRDLIPEDVDGTDRSDHVDLAALEIYRDRERSVARYNEFRRRMLQIPISKWEDLTDDEEAIKTLHEVYGNDVEALDLLVGMAAEKKIKGFAISETAFVIFLLMASRRLEADRFFTSNYNEETYTKRGLKWVNTTETLKDVLDRHYPEMTKKWMNSTSAFSVWDSSSETHNPIPLYFRVPQH

SEQ ID NO: 152 - protein, 508 aa, Ricinus communis
MVVATKLLARRKLIDTGKQFNMIAASWIQFMIHDWIDHLEDTNQIELTAPKEVASQCPLNSFKFYQTKEVPTGFYDIKTGALNIRTPWWDGSAIYGSNSEWLHKVRTFSDGKLKISEDGLLLHDQNDIAISGDVRNSWIGVSTLQALFIKEHNAVCDALKKEYPDLDDEELYRHARLVTAAVIAKVHTIDWTVELLKTDTLLGGMRANWYGILGKKFKDAFGHVGGAVLGGLVGTKKPENHGVPYSLTEEFVSVYRMHSLLPDNLILRDVSVKPGINKSPPLLKVIPMQDLIGLKGEKELPKIGFTAQMVSMGHQACGALELWNYPMWLRDVIPQNIDGSERIDHVDLAALEVYRDRERKVARYNDFRRSLLLIPISKWEDLTDDKEAIEVLREVYDNEVEELDLLVGLMSEKKITGFAISETAFVIFLLMATRRLEADRFFTSNFNENTYTKKGFEWVNTTESLKDVIDRHYPEMTKKWMNSTSAFSVWDSPPNAHNPIPLYLRLPK

SEQ ID NO: 153 - protein, 617 aa, Ricinus communis
MSSMKSLISSYLHRFIHKDFHAVVARMTILDTFLFLIVHSIDKLGIWPKLPVFLGLVYLALRRHLHQNYSLLNVGKTPVFNDVASSQESFFGRNMLPVDQKDKLKKPDPMVVATKLLARRNFKDTGKQFNMIAASWIQFMIHDWIDHLEDTNQIELIAPKEVASQCPLKSFKFYQTKEVPTGFYDINTGALNIRTPWWDGSAIYGSNSEWLHKVRTFKDGKLKISKDGLLLHDPNGIAVSGDVRNSWIGVSTLQALFIKEHNAVCDALKKEYPDLDDEELYRHARLVTAAVIAKIHTIDWTVELLKTDTLLAGMRVNWYGLLGKKFKDTFGHIGGAIFGGVVGLKKPENHGVPYSLTEEFVSVYRMHSLLPDNFILRDVSAEPGVNKSPTLIKEIPMQDLIGLKGEKELSNIGFTAQMVSLGHQTCGALELWNYPMWLRDIIPQNIDGSERINHVDLAALEVYRDRERKVARYNNFRRSLLLVPITKWEDLTDDKEAIEVLSEVYGNEVEELDLLVGLMAEKKITGFAISETAFVIFLLMATRRLETDRFFTSNFNEDTYRKKGLKWVNTTESLKDVIDRHYPEMTKKWMNSTSAFSVWNSPPNAHNFIPLYLRLPK

SEQ ID NO: 154 - protein, 641 aa, Capsicum annuum
MSFVMLKNLLLSPLRNSIHKDFRNVFDRMTLLDKLFFLIVHFIDKHNFWHRLPVFFGLLYLGARRHLHQQYNLINVGRTPTGVRSNPGDYPYRTADGKYNDPFNEGAGSQFSFFGRNMMPVDQHNKLKKPDPMVVATKLLARRKFVDTGKQFNIIAASWIQFMVHDWIDHLEDTEQIELRAPKEVASECPLKSFKFYKSKQTPTDFYEIKTGHLNNRTPWWDGSVIYGSNAKVLQKVRTYEDGKLKLSEDGLIQEDENGKIISGDVRNTWAGLLALQALFVQEHNAVCDTLKEEYPELEEEDLYRHARLVTSAVIAKVHTIDWTVELLKTETMLAGMRANWYGLLGKKFKDTFGHVGDSVFSGVVGMKKPENHGVPYSLTEEFVSVYRMHQLLPDKLQMRNIDATPGPNKSLPLTNEIPMEELIGGKGKENLSKIGFAKQMVSMGHQACGALELWNYPVWMRDLVAQDVDGTDRPDHIDLAALEIYRDRERSVARYNDFRRGMLQIPISKWEDLTDDEEAIETLREVYDDDIEELDLLVGLMAEKKIKGFAISETAFIIFLVMAIRRLEADRFFTSNYNEETYTKKGLEWVNTTESLKDVLDRHYPEMTEKWMNSSSAFAVWDSSPNRHNPIPLYFRVPQQ

SEQ ID NO: 155 - protein, 645 aa, Capsicum annuum
MTLVMLRNLLFSPLRGLIHKDFHEILDKMTLNDKISFLIVHVIDKHNLWHRLPVFFGLVYLGLRRHLNQEYNLINVGRTPTGVRSNPEDYPYRTADGKYNDPFNEGAGSEFSFFGRNMMPVDQRDKLKNPDPMVVATKLLARRNFLDTGKQFNMIAASWIQFMIHDWIDHLEDTQQAYSIELTAPEEVASQCPLKSFKFYKSKETPTGFYEIQTGHLNRRTPWWDGSAVYGSNAEVLKKVRTYKDGKLKLSADGLLEQDENGKIISGDVRNTWAGLLALQALFVQEHNLVCDVLKKEYPELEDEDLYRHARLVTSAVIAKVHSIDWTVELLKTDTLLAAMRTNWYGLLGKKIKDTFGHIGGGGVLGGLVGMKKPQNHGVPYSLTEEFVSVYRMHQLLPDTLQLRNIDATPGPNKSLPLTNEIPMKDLIGGKGEENLSRIGFTKQMVSMGHQACGALELWNYPIWMRDLIPEDVDGTDRSDHVDLAALEIYRDRERSVARYNEFRRRMLQIPISKWEDLTDDEEAIKTLHEVYGNDVEALDLLVGMAAEKKIKGFAISETAFVIFLLMASRRLEADRFFTSNYNEETYTKRGLKWVNTTETLKDVLDRHYPEMTKKWMNSTSAFSVWDSSSETHNPIPLYFRVPQH

SEQ ID NO: 156 - protein, 652 aa, Capsicum annuum
MTLVMLRNLLFSPLRGLIHKDFHEILDKMTLNDKISFLIVHVIDKHNLWHRLPVFFGLVYLGLRRHLNQEYNLINVGRTPTGVRSNPEDYPYRTADGKYNDPFNEGAGSEFSFFGRNMMPVDQRDKLKNPDPMVVATKLLARRNFLDTGKQFNMIAASWIQFMIHDWIDHLEDTQQAYSIELTAPEEVASQCPLKSFKFYKSKETPTGFYEIQTGHLNRRTPWWDGSAVYGSNAEVLKKVRTYKDGKLKLSADGLLEQDENGKIISGDVRNTWAGLLALQALFVQEHNLVCDVLKVGLMKLQKEYPELEDEDLYRHARLVTSAVIAKVHSIDWTVELLKTDTLLAAMRTNWYGLLGKKIKDTFGHIGGGGVLGGLVGMKKPQNHGVPYSLTEEFVSVYRMHQLLPDTLQLRNIDATPGPNKSLPLTNEIPMKDLIGGKGEENLSRIGFTKQMVSMGHQACGALELWNYPIWMRDLIPEDVDGTDRSDHVDLAALEIYRDRERSVARYNEFRRRMLQIPISKWEDLTDDEEAIKTLHEVYGNDVEALDLLVGMAAEKKIKGFAISETAFVIFLLMASRRLEADRFFTSNYNEETYTKRGLKWVNTTETLKDVLDRHYPEMTKKWMNSTSAFSVWDSSSETHNPIPLYFRVPQH

SEQ ID NO: 157 - protein, 509 aa, Eutrema halophilum
MVVATKLLTRRKMIDTGKQFNMIAASWIQFMIHDWVDHLEDTDQIELSAPKEAAKGCPLSSFRFFKTKEVPTGFFEIKTGSLNTRTPWWDSSVIYGSNSKTLERVRTYKDGKLKISEETGLLLHDDDGLAISGDIRNSWVGVSALQALFIKEHNAVCDLLKKEYEDLEDEDLYRHARLVTSAVIAKIHTIDWTVELLKTDTLLAGMRANWYGLLGKKFKDTFGHVGSSIFGGVVGMKKPQNHGVPYSLTEEFTSVYRMHSLLPDQLHMRDIDVTPGPNKSLPLTQEVSMEKLIGREGEETMSQIGFTKLMVSMGHQACGALELMNYPAWFRDLVPQDPNGHDRPDHIDLAALEIYRDRERNVARYNDFRRAMFMIPIKTWEDLTDDKEAIELLDDVYGGDVDELDLLVGLMAEKKIKGFAISETAFNIFLLMATRRLEADRFFTSDFNEMTYTKKGLEWVNTTENLKDVFDRHYPEMTDSWMNSESAFSVWDSPPVAENPIPLYLRFPS

SEQ ID NO: 158 - protein, 638 aa, Vitis vinifera
MASLVSLLTAPLHHFIHEDFHEVVARMTLIDRFLFLIIHSIDKLGIWHRLPVFLGLIYLAIRRHLHEQYNLFNVGSTPRGVRYNPVDYPYRTADGEYNDPFNEGAGSQGTFFGRNILPVDQKDKLKKPDPMVVATKLLARKDFTDTGKQFNMIAASWIQFMIHDWIDHMEDTQQIELTAPREVASQCPLKSFKFYKTKEVATGFYDIKSGSLNIRTPWWDGSAIYGSNEKQLQRVRTFKDGKLKISEDGLLLHDQDMIPVSGDVRNSWAGVSTLQALFVKEHNAVCDALKKEYRHMNDEELYHRARLVTSAVIAKIHTIDWTVELLKTDTLLAGMRANWYGLLGKKFKDTFGHVGGTILGGLVGQKKPNNHGVPYSLTEEFTTVYRMHELLPDHLLLRDISAAPGLNKSPPLVKKLSMPNLIGHEGERALSEIGFARQMVSMGHQASGALQLWNYPVWLRDLIPQDVDGKDRSDHVDLPALEIYRDRERKVARYNQFRRALLLIPISKWEDLTDDSETIKILRELYGDDVEELDTHVGLMAEKKIKGFAISETAFVIFIVMASRRLGADRFFTSNFNEETYTKKGLEWVNTTESLKDVLDRHYPEMTEKWMNSSSAFSVWDSAPNAHNLVPLYLRVPH

SEQ ID NO: 159 - protein, 612 aa, Vitis vinifera
MTLIDRFLFLIIHSIDKLGIWYRLPVFLGLVYLLIRRHLHNQYNLFNVGPTPVGVRFNPADYPYRTADGEYNDPFNDDAGSQGTFFGRNILPVDQKDKLKKPDPTVVATKLMARRNFTDTGKQFNMIAASWIQFMIHDWTDHLEDTQQIELTAPREVASQCPLKSFKFYKTKEVPTGFYDIKTGSLNIRTPWWDGSAIYGNNAKKLQKVRTFKDGKLKISEDGFLLHDQDMIPLSGDVRNGWAGLSTLQALFIKEHNAVCDALKKENGHLSDEELYRHARLVTSAVIAKVLTIDWTVELLKTDTLHAAMRGNWSGLLGKKFKDTYGHVGGAILGGLVGLKRPNNHGMPHSLTEEFVSVYRMHQLLPDHLLLRDISASPGPNKSPPLIKKVPMQNLIGHQGEKALSEIGFTEQMVSMGHQACGALELWNYPVWLRDLIPQDVDGRNRPDPVDLPSLEIYRDRERKVASYNQFRRALLLIPISKWEDLTDDTETIRSLRELYGDNVEELDTQVGLMAEKKIKGFAISETAFVIFIINASRRLEADRFFTSNFNEETYTKKGLEWVNTTESLKDVIHRHYPEMTDKWMNSSSAFSVWDSPPNPHNLVPLYLRVPH

SEQ ID NO: 160 - protein, 643 aa, Helianthus annuus
MKTFMSFAKQQLLSPFKHFIHADFHELFERMTLIDKFLFLIIHGVDKSGIGWHRFPVFLGLTYLAIRRILHDKYNLLSVGKTRVGVRFDTDEVDFRTANGKFNDPLNESAGSEGTFFGRNMPPVDQRDKLLKPDPMVVATKLLARKQLIDTGKQFNMIAASWIQFMIHDWIDHLEETNQIELRAPAEVASECPLKSFRFFETKEIDTGLSDIKKGHRNIRTPWWDASAVYGSNLNAARHIRTFIDGKLKIAKDGLLQHDNDGLPIAGDIRNSWIGVSTLQALFIHEHNAVCDTLKKEYPYLDDEDLYRHARLVTSAVIAKVHTIDWTIELLKTDMLVAGMRANWYGLLGKRFKDTFGHVGGSILGGLVGLKKPENHGVPYSLTEEFTSVYRMHSLLPDQLVIRDLNSTPGPNKSPKITKEIDMINLIGKNGEKELSKIGFTAQMVSMGHQACGALELFNYPVWLRDIVPQNVDGTDRPDHIDLASLEIYRDRERKVARYNEFRRSLFLIPISKWEDLTEDKEAIATLREVYGDDVEELDLLIGMMAEKKINGFAISETAFVIFLAMASRRLQADRFFTSDFNEDVYTKKGFEWVNTTESLKDVLDRHYPEMTDRWMNSTSAFSVWDAAPEPHNPVPIYFRLPK

SEQ ID NO: 161 - protein, 640 aa, Pinus tabuliformis
MGLLDSLKDVFSQHQVIDKSLFATYSRMTLIDKFLFLIIHLVDRFYAWHKLPVFLGLVYLDIRRMLHQRYNLINVGTTPTGVRYNPIDYPYRTADGSYNDPFNSETGSEDTFFGRNMMPSPQNDQLLRPDPIVVATKLLVRRKLIDTGTQFNMLAAAWTQFMIHDWVDHVEDTKQAELRAPSSVASQCPLKEFTFFESKEFPTGFYDIQKGYLNRRTAWWDGSVVYGNDINQSRKVRTFKDGKLKLGEDGLLLHQSDGIAVIGDARNSWAGLSILQALFIKEHNAVCDMLKHHYRDLDDEELYRYARLVTSAVIAKIHTIDWTVELLKTDTLLAAMRANWYGLLGKKFKDVFGHTGSSLLSGFISMPKPQNHGVPYSLTEEFVSVYRMHSMLPDNILLRDIHGTSTTSKTPPVLKQIDMRKLLGISGEKTLSEIGNEAQIVSMGHQACGALDLWNYPVWMRNVIPQDPSGQDRPDHVDTPALEIYRDRERSVSRYNQFRRNMLMIPIAKWEDLTDDKEAIQTLQEVYGSNVEALDLLVGLMAEKKIKGYAISETAFFIFVLMASRRLEADRFFTSDFNKEVYTEKGLEWVNKKTESLKDVLNRHYPELVEKWMSSSSAFSVWSANPEPMNHTPLYFRIPH

SEQ ID NO: 162 - protein, 639 aa, Macleaya cordata
MASIKALISAPFHHFIHKDFHEVVATMTLLDRLLFLIMHSIDKLGIWHRLPVFLGLIYLAIRRHLHQQYNLLNVGPTPIGVRFNPIDYPYRTADGKYNDPFSEVAGSQGTFFGRNIPPVNQKDKLLRPDPMVVATKLLARRSYKDTGKQFNMIAASWIQFMIHDWIDHLEDTKQIELTAPIEVASQCPLKSFKFYKTMEVPTGFYDIKKGFLNTRTPWWDGSVIYGSNAKQLGKVRTHIDGKLKISDEDGLLMHDQDGIALSGDVRNSWAGVSVLQALFIKEHNAVCDALKKEYHDLNDEELYRYARLVTAAVIAKIHTIDWTIELLKTDIMTAAMRANWYGLLGKKFKDAFGHVGGAALGGLVGLKKPQNHGVPYSLTEEFVSVYRMHQLLPDNLLLRDVSTAPGPNKSPPLIETVPMGDLIGLKGEKALSEIGFTGQMVSMGHQACGALELWNYPLWLRDLIPQDKNGRDRPDHVDLPSLEIFRDRERNVARYNEFRRGVLLIPISKWEDLTDDQEAIDVLNEVYGDDVEELDLMVGLMAEKKIKGFAISETAFVVFTLMASRRLEADRFFTSDFNEEMYTKKGLKWVNTTESLKDVMDRHYPEMAKTWMNSTSAFSVWDSPPNSHNHIPLLLRIPS

SEQ ID NO: 163 - protein, 643 aa, Glycine max; identical to SEQ ID NO: 143

SEQ ID NO: 164 - protein, 643 aa, Glycine max
MWSAVTDPIRTFFANFVPHFIHKDFHEAVARMTIIDAFLFIIVHSVDKLGIWPRLPVFLGLLYLAFRRHLHQEYNLFNVGTTPVGVRFNHSDFPYRTADGKYNDPFNEVSGSHGTFFGRNILPVDQKKKLLKPDPMVVATKLLARRTYKDTGKQFNVIAASWIQFMIHDWIDHLEDTNQIELIAPREVASQCPLRSFKFYKTKEIPTGFFEIKSGSSNIRTPWWDASVVYGSNGEVLQRVRTFKDGKIKISKDGHLLHNENGTAIAGDIRNSWAGVSTLQSLFIQEHNAVCDTLKKHYPHLGDEELYRHARLVTSAVIAKVHTIDWTVELLRTDTLLAGMRANWYGLLGKPFKDTFGHVGGVILGGLVGLKRPENHGVTYSLTEEFATVYRMHSLLPDNLQLRDISATPGPNKSLPLIKEIPMKNLIGLQGEKTLSEIGLARQLVSMGHQACGALELWNYPEWLRDLVPQEIDGTDRPDHVDLAALEIYRDRERSVARYNQFRRALLLIPISKWEDLTDDKEAIQVLEEVYGDDVEELDVLVGLMAEKKIKGFAISETAFVIFLLMATRRLKADRFFTSNFNEETYTKKGLEWVNTTESLKDVIDRHYPEMTHKWLNSSSAFSVWDSPPNTHNHIPLYLRVPH

SEQ ID NO: 165 - protein, 632 aa, Solanum lycopersicum
MSFVNLFLFPLRCFIHKDFHDVVDRMSLLNKLLFMMVHLIDKLNLWHRLPVFLGLLYLAARRHLHQQYNLINVDRTFTIDVTSNRVVEKYNDPFNEGCGSELPFFGRNMMPVVQHEKLKNPDPMVVATKLLARRKFIDTGKQFNMIAASWIQFMIHDWIDHLEDTQQIELRAPEEVASECPLKSLKFFKTKQTPTGLCDIKTGHLNIRTPQWDGSAIYGSRSEVSKKVRTFKDGKLKLSENGLLEQDENGKIISGDVRNAWAGLVTLQALFVQEHNLVCDTLKKEYPELKDEELYRHAKRVTAAVIAKIHTIDWTVELLNTDTLLAGMRANWYGLLGKKFKDTFGHVGGSILSGFVGMKKPEDHGVPYSLTEEFTSVYRMHQLLPDTLELRNIDATPGLNKSLPLTNEILMEDLIGGKGNENLSRIGFTKQMVSMGHQASGALELWNYPIWMRDLIAQDVDGTDRPDPIDLAALEIYRDRERSVARYNEFRRRMLQIPITKWEDLSDDMEVIKTLNEVYGDDVEQLDLLVGMSAEKKIKGFAISETAFFIFLIMASRRLEADKFFTSYYNEETYTKKGLEWVNTTESLKDVLDRHYPEMTEKWMNSNSAFSVWNSPPEPHNPIPVYFRVPRT

SEQ ID NO: 166 - protein, 647 aa, Brassica oleracea
MGIGSGIGVPPQGHFFVCVVRKEEDSMIIRSPERNFGRRGGVVIVHAVDKMVPWHKLPVFLGLAYLGLRRHLHQEYNLINVGQTPVGTRFNPADYPYRTADGKFNDPFNEGVGSESSFIGRNCPPVDQKIKLLKPDPMVVATKLLARRKLIDTGKQFNMIAASWIQFMIHDWVDHLEETNQIELVAPKEVANECPLSSFRFFKTKEVPTGFFEIKTGSLNSRTPWWDSSAIYGSNSKAMARVRTYKDGKLKISEETGLLLQDQDGLAISGDIRNSWVGVSALQALFIKEHNAVCDVLKKEYDDLEDEDLYRHARLVTSAVIAKIHTIDWTVELLKTDTLLAGMRTNWYGILGKKFKDSFGHVGSSILGGIVGMKKPQNHGVPYSITEEFTSVYRMHSLLPDQLELRDIDVVPGTKKSLPLIEEVSFGKLLGPKGEQTMSHIGFTKLMVSMGHQASGALELMNYPVWIRDLVPHDPNGYDRPDHIDLAALEIYRDRERNVARYNEFRRSMFMIPIKKWEDLTDDKEAIEALEDVYGGNVEELDLLVGLMAEKKIKGFAISETAFNVFLLMATRRLEADRFFTSDFNEMTYTKKGLEWVNTTESLKDVFDRHYPEMTDRWMNSESAFSVWDSPPVAKNPIPLYLRVPPS

SEQ ID NO: 167 - protein, 640 aa, Brassica oleracea; identical to SEQ ID NO: 147

SEQ ID NO: 168 - protein, 639 aa, Vitis vinifera
MFKRMASLVSLLTAPLHHFIHEDFHEVVARMTLIDRFLFLIIHSIDKLGIWHRLPVFLGLIYLAIRRHLHEQYNLFNVGSTPRGVRYNPVDYPYRTADGEYNDPFNEGAGSQGTFFGRNILPVDQKDKLKKPDPMVVATKLLARKDFTDTGNQFNMIAASWIQFMIHDWIDHMEDTQQIELTAPREVASQCPLKSFKFYKTKEVATGFYDIKSGSLNIRTPWWDGSAIYGSNEKQLQRVRTFKDGKLKISEDGLLLHDQDMIPVSGDVRNSWAGVSTLQALFVKEHNAVCDALKKEYRHMNDEELYHRARLVTSAVIAKIHTIDWTVELLKTDTLLAGMRANWYGLLGKKFKDTFGHVGGTILGGLVGQKKPNNHGVPYSLTEEFTTVYRMHELLPDHLLLRDISAAPGLNKSPPLVKKLSMPNLIGHEGERALSEIGFARQMVSMGHQASGALQLWNYPVWLRDLIPQDVDGKDRSDHVDLPALEIYRDRERKVARYNQFRRALLLIPISKWEDLTDDSETIKILRELYGDDVEELDTHVGLMAEKKIKGFAISETAFVIFIVMASRADRFFTSNFNEETYTKKGLEWVNTTESLKDVLDRHYPEMTEKWMNSSSAFSVWDSAPNAHNLVPLYLRVPH

SEQ ID NO: 169 - protein, 642 aa, Solanum tuberosum
MTMIMLKNLLFSPLRGFIHKDFHQILDKMNLRDKLSFLIVHIVDKHNLWHRVPVFLGLVYLALRRHLNQEYNLINVGRTPTGVRSNPGDFPYRTADGKYNDPFNEGAGSEFSFFGRNMMPVDQHDKLKNPDPMVVATKLLARRKFIDTGKQFNMIAASWIQFMIHDWIDHLEDTQQIEELRAPEEVASQCPLKSFKFYKSKETPTGFYEIKTGYLNRRTPWWDGSAIYGSDVEILKKVRTFKDGKLKLSENGLLEQDENGKIISGDVRNTWAGLLSLQALFVQEHNLVCDALKKEYPELEDEVLYRHARLVTSAVIAKVHTIDWTVELLKTDTLLAAMRANWYGLLGKKFKDTFGHVGGAILGGLVGMKKPENHGVPYSLTEEFVSVYRMHQLLPDKLQLRNIDTTSGPNKSLPLTNEIPMEDLIGGKGAKNLSKIGFITQMVSMGHQACGALELWNYPVWMRDLVAQDVDGTDRPDHVDLPALEIYRDRERSVARYNEFRRRMLQIPITKWEDLTDDEEVIKTLDEVYGDDVEQLDLLVGMSAEKKIKGFAISETAFFIFLLMASRRLEADRFFTSNYNEETYTKKGLEWVNTTESLKDVLDRHYPEMTDKWMNSNSAFSVWDSSPQPHNPLPLYFRVPKH

SEQ ID NO: 170 - protein, 633 aa, Solanum tuberosum
MSFVNLLLFPLRCFIHKDFHDVVDRMSLLNKLLFMMVHLVDKLNLWHRLPVFLGLLYLAARRHLHQEYNLINVGVGRKPIDVTSNRAVGKYNDPFNEGGGSEFPFFGRNMMPVDQHEKLKNPDPMVVATKLLARRKFIDTGKQFNMIAASWIQFMIHDWIDHLEDTQQIELRAPEEVASECPLKSFKFFKTKQTPTGLCDIQTGHLNIRTPQWDGSAIYGNNAEVSKKVRTFKDGKLKLSENGLLEQDENGKIISGDVRNNWAGLLSLQALFVQEHNLVCDTLKKEYPELKDEDLYRHAKLVTSAVIAKIHTIDWTVELLNTDTLLAGMRANWYGLLGKKFKDTFGHVGGSILGGFVGMKKPEDHGVPYSLTEEFTSVYRMHQLLPDTLQLRNIDATPGLNKSLPLTNEILMEDLIGGKGKENLSRIGFTKQMVSMGHQASGALELWNYPIWMRDLIAQDVDGTDRPHHIDLAALEIYRDRERSVARYNEFRRRMLQIPISKWEDLTDDEEVIKTLHEVYGDEVEQLDLLVGMSAEKKIKGFAISETAFIIFLIMASRRLEADKFFTSYYNDETYTKKGLEWVNTTESLKDVLDRHYPEMTEKWMNSNSAFSVWDSSPEPHNPIPLYFRVPRT

SEQ ID NO: 171 - protein, 639 aa, Solanum tuberosum
MSFVMLKNLLLSPLRKFIHKDFHEIFEKMTLIDKLFFLIVHFIDKYNFWHRLPVFFGLLYLGARRTLHQQYNLINVGRTPTGVRSNPADYPYRTADGKFNDPFNEGAGSQFSFFGRNMMPVHQDNKLKKPDPMVVATKLLARKKFIDTGKQFNMIAASWIQFMVHDWIDHLEDTQQVELRAPKEVANECPLKSFRFNKSKETPTDFYEIKKGHLNIRTPWWDGSVIYGSNEDVLKKVRTFKDGKLKLSENGLIQQDENGKIISGDVRNTWAGLLTLQALFVQEHNAVCDTLKKEYPELKDEELYRHARLVTSAVIAKVHTIDWTVQLLKTDTLLAGMRANWYGLLGKKFKDTFGHVGSILSGVVGMKKPENHGVPYSLTEEFVCVYRMHQLLPDTLQLRNIDATPGPNKSLPLTNEIPMEEVVGSKGKENLSRIGFTKQMVSMGHQASGALELWNYPVWMRDLIAQDVDGTDRPHHIDLAALEIYRDRERSVARYNDFRRGMLQIPISKWEDLTDDEEAIKTLREVYDDDIEELDLLVGLMAEKKIKGFAISETAFNIFLLMAIRRLEADRFFTSNYNEETYTKKGLEWVNTTEGLKDVLDRHYPEMTEKWMNSNSAFSVWDSSPEPHNPIPLYFRVPQ

SEQ ID NO: 172 - protein, 611 aa, Solanum tuberosum
MTMIMLKNLLFSPLRGFIHKDFHQILDKMNLRDKLSFLEYNLINVGRTPTGVRSNPGDFPYRTADGKYNDPFNEGAGSEFSFFGRNMMPVDQHDKLKNPDPMVVATKLLARRKFIDTGKQFNMIAASWIQFMIHDWIDHLEDTQQIEELRAPEEVASQCPLKSFKFYKSKETPTGFYEIKTGYLNRRTPWWDGSAIYGSDVEILKKVRTFKDGKLKLSENGLLEQDENGKIISGDVRNTWAGLLSLQALFVQEHNLVCDALKKEYPELEDEVLYRHARLVTSAVIAKVHTIDWTVELLKTDTLLAAMRANWYGLLGKKFKDTFGHVGGAILGGLVGMKKPENHGVPYSLTEEFVSVYRMHQLLPDKLQLRNIDTTSGPNKSLPLTNEIPMEDLIGGKGAKNLSKIGFITQMVSMGHQACGALELWNYPVWMRDLVAQDVDGTDRPDHVDLPALEIYRDRERSVARYNEFRRRMLQIPITKWEDLTDDEEVIKTLDEVYGDDVEQLDLLVGMSAEKKIKGFAISETAFFIFLLMASRRLEADRFFTSNYNEETYTKKGLEWVNTTESLKDVLDRHYPEMTDKWMNSNSAFSVWDSSPQPHNPLPLYFRVPKH

SEQ ID NO: 173 - protein, 641 aa, Helianthus annuus
MIPFLSCAKSLLFWVIKHFVHADFREHFQRMKPLDRLLFLIIHGLDRSGMEWHRFPVFLGLAYLLARRHLHYHYTLLNVGKNQAGERFNPAEFPYRTANGKFNDPSNEDAGSIESFFGRNIAPLDCRKGLLKPNPMKVATKLLARKQFIDTGKQLNLIAVSWIQFMTHDWMDHLESTQQIELKASEKVANQCPLRSFKFYKTERVNTCLDNIKEGHLNIRTSWWDGSAIYGSNSSQLHEVRTYKEGKLKIAGLIQHDQEGLEKAGNIRNAWIGVSSLIALFILEHNAICDALKKEYPNLDDENLYRHARLVTSAVMAKIHTIDWTVQLLKTDTLLAGMRGNWYGILGKRFKDTYGHVGGPFLGGLVGLKKPNNHGVPYSLTEEFVSVYRLHSLLPDHLLIRDIDSSPGPNKSPKLSHKIDMVNLIGNKGEKEFSKIGFTTRMVSMGHQACGALELWNYPVWLRDVVPQNVDATDRADHVDLASLEIYRDRERSVPRYNAFRRSLFLIPISKWDNLTNNKEVIDTLREVYGDDVEQLDLLVGMLAEKKIKGFAICETAFVIFLIMASRRLEADRFFTSDFNEKVYTRKGFEWVNTCESLKDVLDRHYPGMTNRWMNSTSVFTVWDAPPDPHNRIPIYLRLPH

SEQ ID NO: 174 - protein, 642 aa, Helianthus annuus
MIPFLSSTKSLLLSPVKHFIHHDFHVVVQKMPLIDRLLFMIIHGVDKLGIRWYRLPVFLGLVYLAIRRYLHDEYNLLNVGKTPVGVRFNPVDFPFRTADGKFNDLFNEGAGSEGTFFGRNMPPVDQKEKLLQPDPMVVATKLLTRREFKGTGKQFNMIAASWIQFMIHDWIDHLEETNQIELKAPAEVASQCPLKSFKFYKTKEVDTGFYGINKGHINIRTPWWDGSAIYGSNSTKLKKLRTFKDGKLKIGEDGLLQHDNDGVPLSGDVRNGWIGLSTLQALFMLEHNKICDALKKEDHTLSDEDLYRHARLVTSAVIAKIHTIDWTVELLKTDLLHVAMRANWYGLLGKKFKDKFGHVGGAILGGIIGLKKPNNHGVPYSLTEEFVSVYRMHSLLPDQLLIRDVNSTPGPNKSLNVTQKVDMINLIGKKGENELSKIGSRTLMVSMGHQACGALELWNYPAWLRFVVPQNVDGTDRPDQVDLPSLEIYRDRERNVARYNEFRRSLFLIPISKWQDLTDDKKAIDTLREVYGDDVEQLDLLVGMAAEKKIKGFAISETAFVIFIIMASRRLEADRFFTSDFTEEVYTKRGLEWVNTTESLKDVLDRHYEKMTDKLMNPASAFTVWDAPREPNNPIPIYFRVP

SEQ ID NO: 175 - protein, 629 aa, Helianthus annuus
MKTFMSFAKQQLLSPFKHFIHADFHELFERMTLIDKFLFLIIHGVDKSGIGWHRFPVFLGLTYLAIRRILHDKYNLLSVGKTRVGVRFDTDDVDFRTTNGKFNDPFNESAGSEGTFIGRNMPPVDQKEKLLKPDPMLVATKLLARKQLIDTGKQFNMIAASWIQFMIHDWIDHLEETNQIELRAPAEVASECPLKSFKFFETKEIDTGLSDIKKGHRNIRTPWDGSVVYGSNSKAGRHVRTFIDGKLKIAEDGLLQHDNDGLPIAGDVRNSWIGVSTLQALFIHEHNAVCDALKKEYPYLDDEDLYRHARLVTSAVIAKVHTIDWTIELLKTDMLSYVLITFGHVGGSILGGLVGLKKPENHGVPYSLTEEFTSVYRMHSLLPDQLVIRDVNSTPGPNKSPKITKEIDMINLIGKNGEKELSKIGFTTQMVSMGHQACGALELFNYPVWLRDIVPQNVDGTDRPDHIDLASLEIYRDRERKVARYNEFRRSLFLIPISKWEDLTEDKEAIATLREVYGDDVEELDLLIGMMAEKKINGFAISETAFVIFLAMASRRLQADRFFTSDFNEDVYTKKGFEWVNTTESLKDVLDRHYPEMTDRWMNSTSAFSVWDAAPEPHNPVPIYFRLPK

SEQ ID NO: 176 - protein, 643 aa, Helianthus annuus
MKTFMSFAKQQLLSPVKHFIHADFHELFERMTLIDKFLFLIIHGVDKSGIGWHRFPVFLGLTYLAIRRSLHDKYNLLNVGKTRVGVRFDTDDVDFRTANGKFNDPFNESAGSEGTFIGRNMPPVDQKEKLLKPDPMLVATKLLARKQLIDTGKQFNMIAASWIQFMIHDWIDHLEETNQIELRAPAEVASECPLKSFKFFETKEIDTGLSDIKKGHRNIRTPWWDGSVVYGSNSKAGRHVRTFIDGKLKIADDGLLQHDNDGLPIAGDVRNSWIGVSTLQALFIHEHNAVCDALKKEYPYLDDEDLYRHARLVTSAVIAKVHTIDWTIELLKTDMLVAGMRANWYGLLGKRFKDTFGHVGGSILGGLVGLKKPENHGVPYSLTEEFTSVYRMHSLLPDQLVIRDVNSTPGPNKSPKITKEIDMINLIGKNGEKELSKIGFTTQMVSMGHQACGALELFNYPVWLRDIVPQNVDGTDRPDHIDLASLDIYRDRERKVARYNEFRRSLFLIPISKWEDLTEDKEAIATLREVYGDDVEELDLLVGLMAEKKINGFAISETSFIIFLAMASRRLQADRFFTSDFNENVYTKKGFEWVNTTESLKDVLDRHYPEMSDRWMNSTSAFSVWDATPEPHNPVPIYFRLPK

SEQ ID NO: 177 - protein, 644 aa, Manihot esculenta
MFSFIMKSLKSLLTSHLHRYIHEDFHAVVAQMTIVDTFLFLIVHSIDKLGIWPKLPVFLGLFYLAIRRHLHQEYNLLNVGKTPTGVRFNPVDYPYRTADGKFNDPFNEGAGSQGSFFGRNMLPVDQKDKLKKPDPMVVATKLLARRKFIDTGKQFNMIAASWIQFMIHDWIDHLEETNQIELTAPREVVSQCPLKSFKFYKTKQVPTGFYEIKTGTMNIRTPWWDGSAVYGSNAETLNKVRTYKDGKLKISEDDGLLLHDQDGIALSGDVRNSWIGVSTLQALFVKEHNAVCDALKKEYPDMDDEELYRHARLVTAAVIAKIHTIDWTVELLKTDTLLAGMRANWYGLLGKKFKDTFGHVGNAVLGGLVGTKKPENHGVPYSLTEEFVSVYRMHSLLPDHLALRDISSEPGPNKSLPLKEEIPMQNLIGLKGEKALPRIGFTSQMVSMGHQACGALELWNYPLWLRDLIPQDITGHDRLDHVDLPALEVYRDRERNVARYNDFRRSLLLIPISKWEDLTDDKEAIEVLNEVYGDDVEELDVQVGLMAEKKIKGFAISETAFIIFLVMATRRLEADRFFTSNFNEETYTKKGFEWVNTTESLKDVLDRHYPEMTKKWMNSASAFSVWDSPPAARNPIPLYLRVPQ

SEQ ID NO: 178 - protein, 648 aa, Cuscuta campestris
MSTLIMASLKSALLTPLYNFIHKDFHKTVDRMTVLDKLLFFGIHIVDKLGIWHKLPVFLGLIYLGIRRHLNQEYNLFNVGKTPAGVRFDPANYPYRTSDGKYNDPFNEGTGEELSFFGRNLLPAAGHERTKPHPAVVAAKLLARRNSVVIDTGKQFNVIAAAWIQFMIHDWMDHLEDTAAEVEELVAPAEVAGQCPLKSFKFYKSKEEPTGFYEIKTGFRNRRTPWWDGSSIYGSNSSVLERVRTLKDGKLKIGEKDGLLLQDKDGNVITGDARNTWAGVLALQSLFVLEHNAVCDALKKEYPTMEDEELYRHARLVTSAVIAKVHTIDWTVELLKTDTLRAGMRANWYGLLGKKFKDRFGHLGWYVLSGLVGMKKPKNHGVPYSLTEEFTSVYRMHQLLPETISLRNIDVAPGTNKSPLVSREVHMVDLIGRRGEESLSTIGFTRHMVSMGHQSCGALELWNYPCWMRDLVPQDPDGTERPNHVDLPALEVYRDRERSVARYNDFRRGLLLIPISKWEDLTDDEEAIATLEEVYGGGVEELDLQVGLMAEKKIKGFAISETAFVIFLVMATRRIEADRFFTSNYNEETYTERGLRWVDATESLKDVLDRHYPEMTRKWMNSTSAFSVWDSSPDEPHSCFPIYFRLPR

SEQ ID NO: 179 - protein, 523 aa, Vigna angularis
MLPVDQKKKLLKPDPMVVATKLLARRTYKDTGKQFNVIAASWIQFMIHDWIDHLEDTKQIELTAPKEVAGQCPLKSFKFFKTKEIPTGFYEIKTGSSNIRTPWWDGSAVYGSNGEVLQKVRTFKDGKLNISKDGNLLHNENGTAVAGDIRNSWAGVSTLQSLFIQEHNAVCDSLKKFYPDLNDEELYRHARLVTSAVIAKVHTIDWTVELLKTDTLLAGMRTNWYGLLGKKFKDTFGHVGGSILGGFVGMKKPENHGVAYSLTEEFASVYRMHSLLPDNLHLRDLSATPGPNKSLPVVKEIPMKKLIGLPGEKTLTEIGVARQLVSMGHQACGALELWNYPEWLRDLVPQNMDGTERSEHVDLAALEIYRDRERNVARYNQFRRSLLLIPISKWEDLTDDKEAIQVLEEVYGDDVEELDLLVGLMAEKKIKGFAISETAFVIFLVMATRRLEADRFFTSNYNEETYTKKGLEWVNTTESLKDVIDRHYPEMTHKWLNSSSAFSVWDSLPNSPNHVPLYLRVPH

SEQ ID NO: 180 - protein, 508 aa, Glycine soja
MVVATKLLARRTYKDTGKQFNVIAASWIQFMIHDWIDHLEDTNQIELIAPREVARQCPLKSFKFYKTKEIPTGFFEIKSGSSNIRTPWWDASAVYGSNGEVLQRVRTFKDGKIKISKDGHLLHNENGTAIAGDIRNSWAGVSTLQALFIQEHNAVCDNLKKHYPQLGDEELYRHARLVTSAVIAKVHTIDWTVELLKTDTLLAGMRANWYGLLGKKFKDTFGHVGGVILGGLVGLKRPENHGVTYSLTEEFVTVYRMHSLLPDNLQLRDISATPGPNKSPPLVKEIPMKNLIGLQGEKTLSEIGVARQLVSMGHQACGALELWNYPEWLRDLVPQNIDGTDRPDHVDLAALEIYRDRERSVARYNQFRRALLLIPISKWEDLTDDKEAIQVLEEVYGDDVEELDVLVGLMAEKKIKGFAISETAFVIFLLMATRRLEADRFFTSNFNEETYTKKGLEWVNTTESLKDVIDRHYPEMSHKWLNSSSAFSVWDSPPNSQNHIPLYLRVPH

SEQ ID NO: 181 - protein, 643 aa, Vigna angularis
MWSEITDSIRNLFANVLHQFIHKDFHEAVAKMTIIDAFLFIIVHSIDKLGIWPRLPVFLGLLYLAIRRHLHQEYNLFNVGTTPTGIRFNPSDFPYRTADGKYNDPFNEVAGSQGTFFGRNMLPVDQKKKLLKPDPMVVATKLLARRTYKDTGKQFNVIAASWIQFMIHDWIDHLEDTKQIELSAPKEVAGQCPLKSFKFFKTKEIPTGFYEIKTGSSNIRTPWWDGSAVYGSNGEVLQKVRTFKDGKLNISKDGNLLHNENGTAVSGDIRNSWAGVSTLQSLFIQEHNAVCDSLKKYYPHLNDEELYRHARLVTSAVIAKVHTIDWTVELLKTDTLLAGMRANWYGLLGKKFKDTFGHVGGSILGGFVGMKKPENHGVTYSLTEEFTSVYRMHPLLPDNLHLRDLSATPGPNKSLPVIKEIPMKNLIGLPGEKTLTEIGVARQLVSMGHQACGALELWNYPEWLRDLVPQNMDGTERSEHVDLAALEIYRDRERNVARYNQFRRSLLLIPISKWEDLTDDNEAIQVLEEVYGDDVEELDLLVGLMAEKKIKGFAISETAFVIFLVMASRRLEADRFFTSNYNEETYTKKGLEWVNTTESLKDVIDRHYPEMTHKWLNSSSAFSVWDSLPNSPNHVPLYLRVPH

SEQ ID NO: 182 - protein, 643 aa, Glycine soja
MWSAVTDPIRTFFANFVPHFIHKDFHEAVARMTIIDAFLFIIVHSVDKLGIWPRLPVFLGLLYLAFRRHLHQEYNLFNVGTTPVGVRFNHSDFPYRTADGKYNDPFNEVSGSHGTFFGRNILPVDQKKKLLKPDPMVVATKLLASRTYKDTGKQFNVIAASWIQFMIHDWIDHLEDTNQIELIAPREVASQCPLRSFKFYKTKEIPTGFFEIKSGSSNIRTPWWDASVVYGSNGEVLQRVRTFKDGKIKISKDGHLLHNENGTAIAGDIRNSWAGVSTLQSLFIQEHNAVCDTLKKHYPHLGDEELYRHARLVTSAVIAKVHTIDWTVELLRTDTLLAGMRANWYGLLGKPFKDTFGHVGGVILGGLVGLKRPENHGVTYSLTEEFATVYRMHSLLPDNLQLRDISATPGPNKSLPLIKEIPMKNLIGLQGEKTLSEIGLARQLVSMGHQACGALELWNYPEWLRDLVPQEIDGTDRPDHVDLAALEIYRDRERSVARYNQFRRALLLIPISKWEDLTDDKEAIQVLEEVYGDDVEELDVLVGLMAEKKIKGFAISETAFVIFLLMATRRLKADRFFTSNFNEETYTKKGLEWVNTTESLKDVIDRHYPEMTHKWLNSSSAFSVWDSPPNTHNHIPLYLRVPH

SEQ ID NO: 183 - protein, 643 aa, Glycine soja
MWSLVTDLIRALAARVIHQLIHKDFHEAVARMTIIDAFLFIIVHSIDKLGLWHRLPVFFGLLYLGIRRHLQQQYNLFNVGTTPVGIRFNPSDFPYRTDDGKYNDPFNEVAGSQGSFFGRNILPVDHKNKLLKPDPMVVATKLLARRTYKDTGKQFNVIAASWIQFMIHDWIDHLEDTNQIELIAPREVASQCPLKSFKFYKTKEIPTGFFEIKSGSSNIRTPWWDGSVIYGSNREVLEKVRTFKDGKIKISKDGHLLHNENGTAISGDVRNSWAGVSTLQALFTQEHNAVCDALKSNYPHLEDEEVYRHARLVTSAVIAKVHTIDWTVELLKTDTLLAAMHANWYGLLGKTFKDTFGHVGGAALGGLVGLKRPENHGVTYSLTEEFVSAYRIHSLLPDNLQLRDISATPGPNKSPPLIKEIPMKNLIGVQGEEALTKIGVERQLVSMGHQACGALELWNYPLWLRDLVPQNIDGTERKDHIDLAALEIYRDRERSVARYNQFRRALLLIPISKWEDLTDDQEAIQVLEEVYGDDIEELDLLVGLMAEKKIKGFAISETAFTIFIFMSSRRLEADRFFTSNFNEDAYTKKGLEWVNTTESLKNVIDRHYPEMTHKWLNSSSVFSVWNSPPNTQNPIPLYLRVSH

SEQ ID NO: 184 - protein, 640 aa, Brassica rapa; identical to SEQ ID NO: 99

SEQ ID NO: 185 - protein, 607 aa, Glycine soja
MWHTQIVHSIDKLGLWHRLPVFFGLLYLGIRRHLQQQYNLFNVGTTPVGIRFNPSDFPYRTDDGKYNDPFNEVAGSQGSFFGRNILPVDHKNKLLKPDPMVVATKLLARRTYKDTGKQFNVIAASWIQFMIHDWIDHLEDTNQIELIAPREVASQCPLKSFKFYKTKEIPTGFFEIKSGSSNIRTPWWDGSVIYGSNREVLEKVRTFKDGKIKISKDGHLLHNENGTAISGDVRNSWAGVSTLQALFTQEHNAVCDALKSNYPHLEDEEVYRHARLVTSAVIAKVHTIDWTVELLKTDTLLAAMHANWYGLLGKTFKDTFGHVGGAALGGLVGLKRPENHGVTYSLTEEFVSAYRIHSLLPDNLQLRDISATPGPNKSPPLIKEIPMKNLIGVQGEEALTKIGVERQLVSMGHQACGALELWNYPLWLRDLVPQNIDGTERKDHIDLAALEIYRDRERSVARYNQFRRALLLIPISKWEDLTDDQEAIQVLEEVYGDDIEELDLLVGLMAEKKIKGFAISETAFTIFIFMSSRRLEADRFFTSNFNEDAYTKKGLEWVNTTESLKNVIDRHYPEMTHKWLNSSSVFSVWNSPPNTQNPIPLYLRVSH

SEQ ID NO: 186 - protein, 644 aa, Arachis hypogaea
MWSIVMDPIKVLATRFQHQFIHKDFHKAIAKMTIIDSFLFIIIHSMDKLGIKWHRLPVLLGLLYLGIRRHLHEEYNLFNVGTTPKGVRFNPSDFPFRTSDGKYNDPFNEVAGSQGSFFGRNVLPVDQKNKLLKPDPSVVATKLLARKTYKDTGKQFNVIAASWIQFMIHDWIDHLEDTNQIEVTAAREVADECPLKSFRFYKTKEIPTGFYEIKTGAKNIRTPWWDASVIYGSNGEVLKRLRTFKDGKIKISEEGELLHNENGIAVSGDVRNSWVGVSTLQALFVHEHNSICDALKKNYPKLDDEEIYRHARLVTSAVIAKIHTIDWTVELLKTDTLLAGMRANWYGLLGKKFKDTFGHVGGAILGGLVGLKRPNNHGVPYSLTEEFVSVYRMHSLLPDNLQLRDISVTPGPNKSPPLIKEIPMKNLIGLEGEKTLTKIGITSQIVSMGHQACGALELWNYPMWLRDLIPQNLDGSERPDHVDLPVLEIYRERERNVARYNQFRRALLLIPISKWEDLTDDKEAIEVLEDVYGDDVEELDLLVGLMAEKKIKGFAISETAFIIFLLMATRRLEADRFFTSNFNEETYTKKGLEWVNSTESLKDVIDRHYPEITVKWLNSSSAFSVWDSPPNTSNPIPLYLRIPH

SEQ ID NO: 187 - protein, 618 aa, Arachis hypogaea
MWSIVMAPIKVLATRFQHQFIHKDFHEAFAKMTIVDSFLFIIIHSIDKLGIWHQLPVILGLIYLGIRRHLHEEYNLFNVGTTPKGVGFNPSDFEFRTSDGEYNDPFNEVAGSQGSFFGRNVLPVDQKNKLLKPDPSVVATKLLARRTYKDTGKQLNVIAASWIQFMIHDWMDHLEDTNQIEVTAAREVADECPLKSFRDASVIYGSNGEVLKRLRTLKDGKIKISEEGELLHNENGIAVSGDVRNSWAGVSTLQALFVHEHNSVCDALKKNYPELDDKEIYRHARLVTSAVIAKIHTIDWTVELLKTDTLLAGMRKFKDTFGHVGGAILGGLVGLKRPNNHGVPYSLTEEFVSVYRMHSLLPDNLQLRDISATPGPNKSPPLIKEIPMKNLIGLEGEKTLTKIGVASQIVSMGHQACGTLELWNYPMWLRDLIPQNLDGSERPNHVDLPVLEIYRDRERNVARYNQFRRALLLIPISKWEDLTDDKEAIEVLEDVYGDDVEELDLLVGLMAEKKIKGFAISETAFIIFLLMATRRRLEADRFFTSNFNEETYTKKGLEWVNSTESLKDVIDRHYPEITLKWLNSSSAFSVWDSPKHFQSHPSIPSYSPLIIISPFQLY

SEQ ID NO: 188 - protein, 642 aa, Vitis vinifera
MFKRMASLVSLLTAPLHHFIHEDFHEVVARMTLIDRFLFLIIHSIDKLGIWHRLPVFLGLIYLAIRRHLHEQYNLFNVGSTPRGVRYNPVDYPYRTADGEYNDPFNEGAGSQGTFFGRNILPVDQKDKLKKPDPMVVATKLLARKDFTDTGKQFNMIAASWIQFMIHDWIDHMEDTQQIELTAPREVASQCPLKSFKFYKTKEVATGFYDIKSGSLNIRTPWWDGSAIYGSNEKQLQRVRTFKDGKLKISEDGLLLHDQDMIPVSGDVRNSWAGVSTLQALFVKEHNAVCDALKKEYRHMNDEELYHRARLVTSAVIAKIHTIDWTVELLKTDTLLAGMRANWYGLLGKKFKDTFGHVGGTILGGIVGQKKPNNHGVPYSLTEEFTTVYRMHELLPDHLLLRDISAAPGLNKSPPLVKKLSMPNLIGHEGERALSEIGFARQMVSMGHQASGALQLWNYPVWLRDLIPQDVDGKDRSDHVDLPALEIYRDRERKVARYNQFRRALLLIPISKWEDLTDDSETIKILRELYGDDVEELDTHVGLMAEKKIKGFAISETAFVIFIVMASRRLGADRFFTSNFNEETYTKKGLEWVNTTESLKDVLDRHYPEMTEKWMNSSSAFSVWDSAPNAHNLVPLYLRVPH

SEQ ID NO: 189 - protein, 640 aa, Vitis vinifera
MIMEALRTLLSAPLLYFIHKDFHGALANMTLIDRFLFLIIHSIDKLGIWYRLPVFLGLVYLLIRRHLHNQYNLFNVGPTPVGVRFNPADYPYRTADGEYNDPFNDDAGSQGTFFGRNILPVDQKDKLKKPDPMVVATKLMARRNFTDTGKQFNMIAASWIQFMIHDWTDHLEDTQQIELTAPREVASQCPLKSFKFYKTKEVPTGFYDIKTGSLNIRTPWWDGSAIYGNNAKKLQKVRTFKDGKLKISEDGFLLHDQDMIPPSGDVRNGWAGLSTLQALFIKEHNAVCDALKKENGHLSDEELYRHARLVTSAVIAKVHTIDWTVELLKTDTLHAAMRGNWYGLLGKKFKDTYGHVGGAILGGLVGLKRPNNHGMPHSLTEEFVSVYRMHQLLPDHLLLRDISASPGPNKSPPLIKKVPMQNLIGHQGEKALSEIGFTEQLVSMGHQACGALELWNYPVWLRDLIPQDVDGRNRPDPVDLPSLEIYRDRERKVARYNQFRRALLLIPISKWEDLTDDTETIRSLRELYGDNVEELDTQVGLMAEKKIKGFAISETAFVIFIINASRRLEADRFFTSNFNEETYTKKGLEWVNTTESLKDVIHRHYPEMTDKWMNSSSAFSVWDSPPNPHNLVPLYLRVPH

SEQ ID NO: 190 - protein, 643 aa, Capsicum baccatum
MSFVLETLKNLLLSYLRNFIHKDFHATVERMTLIDKISFTMIHFVDTLKMWHRLPVFLGLFYLAIRRHLHQQYNLINVGRTPTGVRSNPADYPYRTADGKYNDPFNDASGSEFSFFGRNMMPVDQNNELTKPDPMVVATKLLARKKFIDTGKQFNMIAVAWIQFMIHDWIDHLEDTQQIELKAPEEVASECPLKSFKFYKSKKTSTGFYEIKTGHLNRRTPWWDGSVIYGSDEDVLKKVRTFKDGKLKLSADGLLEQDSNGKIISGDVRNPWAGLLALQALFVHEHNLVCDTLKKEYPELEDEDLYRHARLVTSAVIAKIHTIDWTVELIKTDTLLAGMRANWYGLLGKRFKDVFGHVGGSILGGIVGMKKPQNYGVPYSLTEEFTSVYRMHQLLPEKLQLRNVDAAPGPNKSLPLINEIPMEDLIRVKGEEHLSKVGFIKQMVSMGHQASGALELWNYPVWMRNLIAQDVDGTDRPDHVDLAALEIYRDRERNVARYNEFRRRMLQIPISKWEDLTDDEEAIKTLREVYGDNVEEMDLLVGMAAEKKLKGFAISETAFFIFLLMASRRLEADRFFTSNYNEETYTKKGLEWANTTESLKDVLDRHYPGMTEKWMNSNSAFSVWDSSPEPPNPIPIYFRIPKQ

SEQ ID NO: 191 - protein, 639 aa, Capsella rubella
MEVITSLISSILLKFIHEDFREIYSKMSLLDRFLLLIVHAVDKMVPWHKLPVFLGLAYLEARRHLHQEYNLLNVGQTPAGTRFDPANYPYRTPDGKFNDPFNEGVGSQNSFFGRNCPPVDQKTKLLRPDPMVVATRLLGRRKFIDTGKQFNMIATSWIQFMIHDWIDHLEDTQQIEVVAPKEVENQCPLKSFRFFKTKEVPTGFFEIKTGSQNIRTPWWDSSVIYGSNSKTLERVRTYKDGKLKISNDTGLLLHDQDGLAISGDIRNSWVGLSALQALFIKEHNAVCDALKDEDSDLEDEDLYRYARLVTSAVIAKIHTIDWTVQLLKTDTLLAAMRANWYGILGKKFKDSFGHVGGSILGGLVGLKKPQNHGVPYSLTEEFTSVYRMHSLLPDQLQMRDINVVPGTNKSLPLMEEIYMENLTGRKGEQNMSQIGFTKLMVSMGHQASGALELMNYPMWLRDIVPQDPNGQDRPDHVDLAALEIYRDRERNVARYNDFRRAMFMIPIAKWEDLTDDVEAIEVLDDVYGGDVEELDLLVGLMAEKKIKGFAISETAFYIFVLMASRRLEADRFFTSEFNETIYTKKGFEWVNTTESLKDVLDRHYPDMTEKWMNSESAFSVWDSPPVTKNPIPLYLRIPA

SEQ ID NO: 192 - protein, 669 aa, Capsicum baccatum
MYMYSKAYIEHPITYNICFQLSYKLGNMTLVMLRNLLFSPLRGLIHKDFHEILDKMTLNDKISFLIVHVIDKHNLWHRLPVFFGLVYLGLRRHLNQEYNLINVGRTPTGVRSNPADYPYRTADGKYNDPFNEGAGSEFSFFGRNMMPVDQHDKLKNPDPMVVATKLLARRNFLDTGKQFNMIAASWIQFMIHDWIDHLEDTQQIELTAPEEVASQCPLKSFKFYKSKETPTGFYVIQTGHLNRRTPWWDGSAVYGSNAEVLKKVRTYKDGKLKLSADGLLEQDENGKIISGDVRNTWAGLLALQALFVQEHNLVCDVLKKEYPELEDEDLYRHARLVTSAVIAKVHTIDWTVELLKTDTLLAAMRTNWYGLLGKKIKDTFGHIGGGGILGGLVGMKKPQNHGVPYSLTEEFVSVYRMHQLLPDTLQLRNIDATPGPNKSLPLTNEIPMKDLIGGKGEENLSRIGFTKQMVSMGHQACGALELWNYPIWMRDLIPEDVDGTDRSDHVDLAALEIYRDRERSVARYNEFRRRMLQIPISKWEDLTDDEEAIKILHEVYGNDVEALDLLVGMAAEKKIKGFAISETAFVIFLLMASRRLEADRFFTSNYNEETYTKRGLKWVNTTETLKDVLDRHYPEMTKKWMNSTSAFSVWDSSSETHNPIPLYFRVPQH

SEQ ID NO: 193 - protein, 645 aa, Capsella rubella
PQKLKRMKLITSLISSILLKFIHKDFHEIYSRMSLLDRLILLVVHAVDKMVPWHKLPVFLGLAYLEARRHLHQEYNLLNVGQTPVGTRFDPANFPYRTADGKFNDPFNEGVGSQNSFFGRNCPPVDQKTKLLRPDPMVVATKLLGRRKFIDTGKQFNMIAASWIQFMIHDWIDHLEDTHQIELVAPREVANQCPLRSFRFFKTKEVPTGFFDIKTGSQNIRTPWWDSSVIYGSNSKTMDRVRTYKDGKLKISEETGLLLHDKDGIAISGDVRNSWVGVSALQALFIKEHNAVCDALKDDDNDLEDEDLYRHARLVTSAVIAKIHTIDWTTQLLKTDTLLAGMRANWYGVLGKKFKDSFGHAGSSILGGVVGMKKPKNHGVPYSLTEDFASVYRMHSLLPDQLQMRDIDDEPGTNKSLPLIKEISMSHLIGLKGEQTMSQIGFTKLMVSMGHQASGALELMNYPLWFRDIIPHDHNGQERSDHVDLAALEIYRDRERSVPRYNDFRRAMFMIPITKWEDLTADKDAIEVLDDVYDGDVEELDLLVGLMAEKKIKGFAISETAFYIFLLMATRRLEADRFFTSDFNETVYTKKGLKWVNTTESLKDVFDRHYPEMTDKWMNSESAFSVWDSPPVTKNPIPLYLRIPS

SEQ ID NO: 194 - protein, 641 aa, Capsicum baccatum
MSFVMLKNLLLSPLRNSIHKDFRNVFDRMTLLDKLFFLIVHFIDKHNFWHRLPVFFGLLYLGARRHLHQQYNLINVGRTPTGVRSNPGDYPYRTADGKYNDPFNEGAGSQFSFFGRNMMPVDQHNKLKKPDPMVVATKLLARRKFVDTGKQFNIIAASWIQFMVHDWIDHLEDTEQIELRAPKEVASECPLKSFKFYKSKQTPTDFYEIKTGHLNNRTPWWDGSVIYGSNAKVLQKVRTYEDGKLKLSEDGLIQEDENGKIISGDVRNTWAGLLALQALFVQEHNAVCDTLKEEYPELEEEDLYRHARLVTSAVIAKVHTIDWTVELLKTDTMLAGMRANWYGLLGKKFKDTFGHVGDSVFSGVVGMKKPENHGVPYSLTEEFVSVYRMHQLLPDKLQMRNIDATPGPNKSLPLTNEIPMEELIGGKGKENLSKIGFAKQMVSMGHQACGALELWNYPVWMRDLVAQDVDGTDRPEHIDLAALEIYRDRERSVARYNDFRRGMLQIPISKWEDLTDDEEAIETLREVYDDDIEELDLLVGLMAEKKIKGFAISETAFIIFLVMAIRRLEADRFFTSNYNEETYTKKGLEWVNTTESLKDVLDRHYPEMTEKWMNSSSAFAVWDSSPNRHNPIPLYFRVPQQ

SEQ ID NO: 195 - protein, 643 aa, Capsicum baccatum
MSFIMSSLRNLFLSPLRSFIQKDFHDAFDRMTLLDKLLFMMVHFVDKLILWHRLPVFLGLAYLAARRHLHQEYNLINVGRTPTGVRSNPEDYPYRTADGKYNDPFNEGAGSQFSFFGRNVMPVDQHDKLKKPDPMVVATKLLARKKFMDTGKQFNMIAASWIQFMIHDWIDHLEDTHQIELRAPEEVASECPLKSFKFYKSKKTPTGFYEIKAGYLNRRTPWWDGSAIYGSNTEALKKVRTFEDGKLKLSADGLLEQDENGNIISGDVRNPWAGLLALQALFIQEHNLVCDTLKKEYPKLEDEDLYRHARLVTSAVIAKVHTIDWTVELLKTDTLLAGMRANWYGLLGKKFKDTFGHVGGSSLGGFVGMKKPENHGVPYSLTEEFVSVYRMHQLLPDTLQLRNIDATPGPNKSIPLTNEIPMEDLIGGKGEENLSRIGFTKQMVSMGHQACGALELMNYPIWMRDLIPQDVDGNDRPDHIDLAALEIYRDRERSVARYNEFRRRMLQIPISKWEDLTDDEEAIKMLREVYGDDVEELDLLVGMSAEKKIKGFAISETAFFIFLIMASRRLEADKFFTSNYNEETYTKKGLEWVNTTESLKDVLDRHYPEMTGKWMNSNSAFSVWDSSPEPHNPIPIYFRVPQQ

SEQ ID NO: 196 - protein, 643 aa, Nicotiana attenuata
MSLVMASLKNLLLSPLRGFIHKDFHDIFERMTLLDKLFFLIVHFVDKLNLWHRLPVFLGLLYLGARRHLHQEYNLINVGKTPVGVRSNPADHPYRTADGKYNDPFNEGAGSELSFFGRNMLPVDQHNQLKKPDPMVVATKLLARRNVVDTGKQFNMIAASWIQFMIHDWIDHLEDTKQIELRAPEEVASQCPLKSFKFFKTKEIPTGFYEIKTGHLNRRTPWWDGSAIYGSNAEVLKKVRTFKYGKLKLSADGLLEIDENGKIISGDVRNTWAGLSALQALFVQEHNSVCDVLKKEYPELEDEDLYRHARLVTSAVIAKVHTIDWTVELLKTDTLLAGMRANWYGLLGKKFKDTFGHVGGSILGGFVGMKKPENYGVPYSLTEEFTSVYRMHQLLPDNLQLRNIDATPGPNKSLPLTNEIPMEDLIGSKGEENLARIGFTKQMVSMGHQACGALELWNYPMWMRDLIPQDVDGTDRPDHVDLAALEIYRDRERSVARYNEFRRGMLQIPISKWEDLTDDEEVINTLREVYGDDVEELDLMVGMAAEKKIKGFAISETAFFIFLIMASRRLEADRFFTSNYNEETYTKKGLEWVNTTESLKDVLDRHYPEMTEKWMNSSSAFSVWDSSPEPHNPIPLYFRVPPQ

SEQ ID NO: 197 - protein, 639 aa, Solanum lycopersicum
MSFVMLKNLLLSSLRKFIHKDFHEIFDKMTLIDKLFFLIVHFIDKHNFWHRLPVFFGLLYLGARRSLHQQYNLINVGRTPTGVRSNPADYPYRTADGKFNDPFNEGTGSQFSFFGRNMMPLHQNNKLKKPDPMVVATKLLARRKFIDTGKQFNMIAASWIQFMVHDWIDHLEDTQQVELRAPKEVANECPLKSFRFNKSKETPTDFYEIKTGHLNSRTPWWDGSVIYGSNEDVLKKVRTFRDGKLKLGENGLIQQDENGKIISGDVRNTWAGLLTLQALFVQEHNAVCDTLKKEYPELEDEELYRHARLVTSAVIAKVHTIDWTVQLLKTDTMLAGMRANWYGLLGKKFKDTFGHVGSILSGVVGMKKPENHGVPYSLTEEFTSVYRMHQLLPDTLQLRNIDATPGPNKSLPLTNEIPMEEVVGSKGKENLSRIGFTKQMVSMGHQASGALELWNYPVWMRDLIAQDVDGTDRPDPIDLAALEIYRDRERSVPRYNDFRRGMLQIPISKWEDLTDDEEAIKTLGEVYDDDIQELDLLVGLMAEKKIKGFAISETAFNIFLLMAIRRLEADRFFTSNYNDETYTKKGLEWVNTTESLKDVLDRHYPEMTDKWMNSNSAFSVWDSSPQPHNPIPLYFRVPQ

SEQ ID NO: 198 - protein, 643 aa, Capsicum annuum
MSFIMSSLRNLFLSPLRSFIQKDFHDAFDSMTLLDKLLFMMVHFVDKLILWHRLPVFLGLAYLAARRHLHQEYNLINVGRTPTGVRSNPEDYPYRTADGKYNDPFNEGAGSQFSFFGRNVMPVDQHDKLKKPDPMVVATKLLARKNFMDTGKQFNMIAASWIQFMIHDWIDHLEDTHQIELRAPEEVASECPLKSFKFYKSKKTPTGFYEIKTGYLNRRTPWWDGSAIYGSNTEALKKVRTFEDGKLKLSADGLLEQDENGNIISGDVRNPWAGLLALQALFIQEHNLVCDTLKKEYPKLEDEDLYRHARLVTSAVIAKVHTIDWTVELLKTDTLLSGMRANWYGLLGKKFKDTFGHVGGSSLGGFVGMKKPENHGVPYSLTEEFVSVYRMHQLLPDTLQLRNIDATPGPNKSLPLTNEIPMEDLIGGKGEENLSRIGYTKQMVSMGHQACGALELMNYPIWMRDLIPQDVDGNDRPDHIDLAALEIYRDRERSVARYNEFRRRMLQIPISKWEDLTDDEEAIKMLREVYGDDVEELEFVSGNVCGEKDKGFAISETAFFIFLIMASRRLEADKFFTSNYNEETYTKKGLEWVNTTESLKDVLDRHYPEMTGKWMNSNSAFSVWDSSPEPHNPIPIYFRVPQQ

SEQ ID NO: 199 - protein, 637 aa, Salvia splendens
MAFLDFIFQKFIHKDIFEAFQRMTLIDKLIFLFVHSVDKSGVAWHRFPVFLGLLYLALRRRLHENYNLFTVGPKRAVGSTFDPAAVHFRTADGEFNDPDDVDAGSSGSFFGRNILPLEQKNKLTRPDPMVVATKLLARKELIDTGKQFNMIAASWIQFMVHDWVDHLENLHHQIELKAPEEVASQCPLKSFKLYESKSIDNGIESGFLNRRTPWWDGSAIYGSEKETLKKVRTFENGKLKISADGLLPVNSNGTVLSGDVRNVWAGLSALQALFVKEHNSVCDALMVRTKEYPNLGDEKLYRHARLVTSAVIAKVHTIDWTVELLKTDTLRAGMRANWYGLLGKSFKDRFGHVGVAELSGLVGLSNPVDHGVPYSLTEEFVSVYRMHPLLPDKLRLRNIHASPGPNKSPPLDTEIEMVELIGKKGTENLSRIGLRKQIVSMGHQACGALELWNYPIFLRNLVSHNVDGTDRPDPVDLPALEIYRDRERSVARYNNFRRGLLMIPITKWEDLTDDEEAIETLRQVYNDDVEELDLLVGLLAEKKIKGFAISETAFFVFLIMATRRLEADRFFTSDFNEETYTKKGLEWVNATESLKDVLDRHDPEMSTKWINSTSAFTVWDASPEPTNPVPLYLRLPS

SEQ ID NO: 200 - protein, 642 aa, Solanum lycopersicum
MTMIMLKNLLFSPLRGFIHKDFHQILDKMNLRDKLSFLIVHIIDKHNLWHRVPVFLGLVYLALRRHLNQEYNLINVGRTPSGVRSNPGDFPYRTADGKYNDPFNEGAGSEFSFFGRNMMPVEQHDKLKNPDPMVVATKLLARREFIDTGKQFNMIAASWIQFMIHDWIDHLEDTQQIEELRAPEEVASQCPLKSFKFYKSKETPTGFYEIKTGHLNRRTPWWDGSVIYGSNVEILKKVRTFKDGKLKLSENGLLEQDENGKIISGDVRNTWAGFVTLQALFVQEHNLVCDVLKKEYPELEDEELYRHARLVTSAVIAKVHTIDWTVELLKTDTLFAAMRTNWYGLLGKKFKDTFGHVGGAILGGLVGLKKPENHGVPYSLTEEFVSVYRMHQLLPDKLQLRNIDATSGPNKSIPLTNEIPMGDLIGGKGEENLSRIGFTKQMVSMGHQACGALELWNYPIWMRDLIAQDVDGTDRPHHVDLAALEIYRDRERSVARYNEFRRRMLQIPITKWEDLTDDMEVIKTLHEVYGDDVEQLDLLVGMSAEKKIKGFAISETAFFIFLLMASRRLEADRFFTSNYNEETYTKKGLEWVNTTESLKDVLDRHYPEMTDKWMNSNSAFSVWDSSPQPHNPVPLYFRVPKH

SEQ ID NO: 201 - protein, 646 aa, Vigna unguiculata
MWSVITDPIRNLFANVLHHFIHKDFHEAVAKMTIIDAFLFIIVHSIDKLGIWPRLPVFLGLLYLAIRRHLHQEYNLFNVGTTPTGVRFNPSDFPYRTADGKYNDPFNEVVGSEGTFFGRNMLPVDQKKKLLKPDPMVVATKLLSRRTYKDTGKQFNVIAASWIQFMIHDWIDHLEDTKQIELTAPKEVSSQCPLKSFKFFKTKEIPTVPTGFYEIKSGSLNIRTPWWDASVVYGSNGEVLQKVRTFKDGKVKISKDGNLVHNENGTAVAGDVRNSWAGVSTLQSLFIQEHNAVCDSLKKYYPDLNDEELYRHARLVTSAVIAKIHTIDWTVELLKTDTLLAGMRINWYGLLGKKFKDTFGHVGGSILGGFVGMKKPENHGVKYSLTEEFVSVYRMHSLLPDNLQLRDISATPGPNKSPPVIKEIPMKNLIGLPGEKTLSEIGVAIQLVSMGHQACGALELWNYPEWLRDLVPQNVDGTERSELVDLAALEIYRDRERNVPRYNQFRRALLLIPITKWEDLTDDKEAIEVLEEVYGDDVEELDLLVGLMAEKKIKGFAISETAFVIFLLMASRRLEADRFFTSNYNEETYTKKGLEWVNTTESLKDVIDRHYPEMTHKWLNSSSAFSVWDSLPNSPNHVPLYLRVPH

SEQ ID NO: 202 - protein, 642 aa, Phaseolus vulgaris
MMWSMVTDPIRALSATLLHKLIHQDFHEAVARMTILNSFLFIIVHSIDKLGIWHRLPVFLGLLYLAIRRHLHQEYNLFNVGTTTPERVGNPSDLPFRTDDGKYNDPSNEVAGSQGTFIGRNMLPLDHKNKVLKPDPMVVATKLLARRTYKDTGKQFNVIAASWIQFMIHDWIDHLEDTKQIELTAPREVASQCPLKSFKFFKTKEFPTEFSEIKSGTKNIRTPWWDGSVLYGSNREVSMKVRTFKDGKIKISKDGHLLHNENGTAISGDVRNSWAGVSTLQALFVQEHNAVCDTLKIHYPELEDEELYNHARLVTSAVIAKIHTIDWTVELLKTDTLLAGMRVNWYGFLGKKFKDAFGHVGGSILGGLVGLKKPQNHGVPYSLTEEFVCVYRMHSLLPDNLQLRDISATPGPDKSLPVIKEIPMKNLVGLQGEKMLAEVGVARQLVSMGHQACGALVLWNYPVWLRDLISQNLDGTERPDLVDLAALEIYRDRERGIPRYNQFRRGLLLIPISKWEDLTDDKEAIQVLEEVYGDDVEELDLLVGLMAEKKIKGFAISETAFVIFLLMATRRLEADKFFTSKFNKEVYTIKGFEWIKRTESLKDVIDRHYPEMTHKWLNSSSAFSVWSSLPDAENLIPLYLRI

SEQ ID NO: 203 - protein, 614 aa, Citrus clementina
MTLIDKFLFLIVHTMDKLGILWHRLPVFVGVRFNPGDYPYPTANGEYNDPFIEGAGSEGTFFGRNVLPADKKHKLLKPDPVVVATKLLSRRSFIDTGKQFNTIAAAWIQTQIKFVNFNYYIYDWIDHLRVDSPLSMHRFGVELVAPREVAGKCPLSSFKFYKTKEVPTGFHEIKHGHLNVRTPWWDGSAIYGSNAERLHKLRTFKDGKLKIAKDGLLLHDQNGVAVTGDVRNTWAGLSTLQALFVKEHNAVCDALKKEYPDLGDEELYRHARLVTSAVIAKVHTIDWTEELLKTDPACRDAYQLRIVLLDHNDPILYGILGKKFKDTFGHVGGAILGGFVRMKKPENHGVPYSLTEEFTSVYRMHALLPDTLNLRDIDAQPGPNKSPPLAEKVPMENLVGHKGEKALSDIGFGKRIVSMGHQACGALELWNYPLWLRDLIPQNTDGTDRLIMWTYQLLKARDRERKVARYNEFRRALLLIPISKWEDLTEDKEAIEVLNEVYGDDVEELDLQVGLMAEKKIKGFAISETAFLIFLLMASRRLEADRFFTSSFNEETYTKKGLEWVNTTESLKDVLYRHYPEITEKWMNSTSAFSVWDSPPNSHNPIPLYLRVPQ

SEQ ID NO: 204 - protein, 639 aa, Citrus clementina
MEFLKNLFTAPLHRFIHKDFHEVVSRMTLIDKFLFLIVHSMDKLGILWHRLPVFVGLFYLGLRRHLHQEYNLFNVGKTPAGVRFNPADYPYRTANGEYNDPFNEGAGSEGTFFGRNILPADQKHKLLKPDPLVVATKFLSRRSFKDTGKQFNMIAATWIQFMIHDWIDHLEDTNQVELVAPREVADKCPLSSFKFYKTKEVPTGFYEIKEGHLNVRTPWWDGSGIYGSNAERLHKLRTFKDGKLKIAKDGLLLHDQNGVAVTGDVRNTWAGLSTLQALFVKEHNAVCDALKREDPDLGDEELYRHARLVTSAVIAKVHTIDWTVELLKTDTLLAGMRINWYGILGKKFKDTFGHVGGAILGGFVGMKKPENHGVPYSLTEEFTSVYRMHALLPDTLNLRDIDAQPGPNKSPPSAEKVPMENLVGHKGEKALSAIGFEKRIVSMGHQACGALELWNYPLWLRDLIPQNTDGTDRPDHVDLPALEVYRDRERKVARYNEFRRALLLIPISKWEDLTEDKEAIEVLNEVYGDDVEELDLQVGLMAEKKIKGFAISETAFVIFLLMASRRLEADRFFTSSFNEETYTKKGLEWVNTTESLKDVLHRHYPEITEKWMNSTSAFSVWDSPPNSHNPIPLYLRVPQ

SEQ ID NO: 205 - protein, 638 aa, Aquilegia coerulea
MSSIKALFSAPFYRLIHRDFHEVVATMPLTDKILFLIMHSVDKFGIWHRLPVLLGLTYLAIRRMLQQTYNLINVGSTPVGVRFNHVDYRTSDGKLNDPSNEVAGSQGSFFGRNIQPVDQRDKLTKPDPMVVATKLLARTDFKDTGKQFNMIAASWIQFMIHDWIDHLEDTQQIELIAPTEVASQCPLKSFKFYKTREVPTGSYDINSGHLNIRTPWWDGSAIYGSNNKTLSKVRTYKDGKLKISEDGLLPHDEDGAAVSGDVRNSWAGVSVLQALFVKEHNTVCDTLKREYGDLNDEDLYRHARLVTSAVIAKIHTIDWTVELLKTDTLLAGMRGNWYGLLGKKFKDAFGHVGGFILGGLVGLKSPQNHGVPYSLTEEFTSVYRMHALLPDNLLLRDTSAAPGPNKLPPLIEEVPMAEMIGLRGEARLSQIGFTKQMVSMGHQPSGALELFNYPMFLRDLTPQDRDGKDRPDHVDLAALEVYRDRERKVARYNEFRRGLMLIPITKWEDLTDDAEAIKTLHEVYGDNVEDLDLLVGLMAEKKIRGFAISETAFLIFTVMATRRLEADRFFTSYFNEETYTKKGLEWVNTTESLKDVLQRHYPEMLTTWMNSSSNSVFSVWDSPPPAHNAVPLYLRFPN

SEQ ID NO: 206 - protein, 640 aa, Aquilegia coerulea
MSSIKTLFSAPFYRLIHRDFHKVVATMPLTDKILFLTMHSVDKLGIWHRLPVFLGLTYLAIRRTLQQTYNLINVGPTPVGVRFNPVDYPYRTSDGKFNDPFNEIAGSQGSFFGRNIQPVDQSDKLRNPDPMEVATKLLARTDFKDTGKQFNMIAASWIQFMIHDWIDHLEDTQQIELIAPSEVASQCPLKSFKFYKTKEVPTGFYDIKSGHLNIRTPWWDGSAIYGSNNKTLSKVRTYKDGKLKISKDGLLPHDEDGVAVSGDVRNSWAGVSVLQALFVKEHNAVCDTLKREYGDLNDEDLYRHARLVTSAVIAKVHTIDWTVELLKTDTLLAGMRANWYGLLGKKFKDAFGHVGGAILGGLVGLKNPQNHGVPYSLTEEFTSVYRMHALLPDNLLLRDTSAAPGPNKLPPLIEEVPMAEMIGLRGEARLSQIGFTKQMVSMGHQPSGALELFNYPMFLRDIIPQDRDGKDRPDHVDLAALEVYRDRERSVARYNEFRRGLMLIPITKWEDLTDDAEAIKTLHEVYGDNVEDLDLLVGLMAEKKIPGFAISETAFLIFTVMATRRLEADRFFTSYFNEETYTKKGLEWVNTTESLKDVLQRHYPEMLTTWMNSSSNSVFSVWDSPPPAHNPVPLYLRFPN

SEQ ID NO: 207 - protein, 639 aa, Eutrema salsugineum
MKVVSSLISSLLIKFIHRDFHEIYSRMSLFDRFLLLIVHAVDKMVPWHKLPVFLGLAYLGLRRHLHQEYNLINVGKTPVGTRFNPIDYPYRTADGKFTDPFNEGVGSQNSFIGRNCPPVDQKIKLLKPDPMVVATKLLTRRKMIDTGKQFNMIAASWIQFMIHDWVDHLEDTDQIELSAPKEAAKGCPLSSFRFFKTKEVPTGFFEIKTGSLNTRTPWWDSSVIYGSNSKTLERVRTYKDGKLKISEETGLLLHDDDGLAISGDIRNSWVGVSALQALFIKEHNAVCDLLKKEYEDLEDEDLYRHARLVTSAVIAKIHTIDWTVELLKTDTLLAGMRANWYGLLGKKFKDTFGHVGSSIFGGVVGMKKPQNHGVPYSLTEEFTSVYRMHSLLPDQLHMRDIDVTPGPNKSLPLTQEVSMEKLIGREGEETMSQIGFTKLMVSMGHQACGALELMNYPAWFRDLVPQDPNGHDRPDHIDLAALEIYRDRERNVARYNDFRRAMFMIPIKTWEDLTDDKEAIELLDDVYGGDVDELDLLVGLMAEKKIKGFAISETAFNIFLLMATRRLEADRFFTSDFNEMTYTKKGLEWVNTTENLKDVFDRHYPEMTDSWMNSESAFSVWDSPPVAENPIPLYLRFPS

SEQ ID NO: 208 - protein, 641 aa, Capsicum chinense
MSFVMLKNLLLSPLRNSIHKDFRNVFDRMTLLDKLFFLIVHFIDKHNFWHRLPVFFGLLYLGARRHLHQQYNLINVGRTPTGVRSNPGDYPYRTADGKYNDPFNEGAGSQFSFFGRNMMPVDQHNKLKKPDPMVVATKLLARRKFVDTGKQFNIIAASWIQFMVHDWIDHLEDTEQIELRAPKEVASECPLKSFKFYKSKQTPTDFYEIKTGHLNNRTPWWDGSVIYGSNAKVLQKVRTYEDGKLKLSEDGLIQEDENGKIISGDVRNTWAGLLALQALFVQEHNAVCDTLKEEYPELEEEDLYRHARLVTSAVIAKVHTIDWTVELLKTDTMLAGMRANWYGLLGKKFKDTFGHVGDSVFSGVVGMKKPENHGVPYSLTEEFVSVYRMHQLLPDKLQMRNIDATPGPNKSLPLTNEIPMEELIGGKGKENLSKIGFAKQMVSMGHQACGALELWNYPVWMRDLAAQDVDGTDRPDHIDLAALEIYRDRERSVARYNDFRRGMLQIPISKWEDLTDDEEAIETLREVYDDDIEELDLLVGLMAEKKIKGFAISETAFFIFLVMAIRRLEADRFFTSNYNEETYTKKGLEWVNTTESLKDVLDRHYPEMTEKWMNSSSAFAVWDSSPNRHNPIPLYFRVPQQ

SEQ ID NO: 209 - protein, 644 aa, Capsicum chinense
MSFIMSSLRNLFLSPLRSFIQKDFHDAFDSMTLLDKLLFMMVHFVDKLILWHRLPVFLGLAYLAARRHLHQEYNLINVGRTPTGVRSNPEDYPYRTADGKYNDPFNEGAGSQFSFFGSRNVMPVDQHDKLKKPDPMVVATKLLARKNFMDTGKQFNMIAASWIQFMIHDWIDHLEDTHQIELRAPEEVASECPLKSFKFYKSKKTPTGFYEIKTGYLNRRTPWWDGSAIYGSNTEALKKVRTFEDGKLKLSADGLLEQDENGNIISGDVRNPWAGLLALQALFIQEHNLVCDTLKKEYPKLEDEDLYRHARLVTSAVIAKVHTIDWTVELLKTDTLLAGMRANWYGLLGKKFKDTFGHVGGSSLGGFVGMKKPENHGVPYSLTEEFVSVYRMHQLLPDTLQLRNIDATPGPNKSLPLTNEITMEDLIGGKGEENLSRIGYTKQMVSMGHQACGALELMNYPIWMRDLIPQDVDGNDRPDHIDLAALEIYRDRERSVARYNEFRRRMLQIPISKWEDLTDDEEAIKMLREVYGDDVEELDLLVGMSAEKKIKGFAISETAFFIFLIMASRRLEADKFFTSNYNEETYTKKGLEWVNTTESLKDVLDRHYPEMTGKWMNSNSAFSVWDSSPEPHNPIPIYFRVPQQ

SEQ ID NO: 210 - protein, 643 aa, Capsicum chinense
MSFVLETLKNLLLSYLRNFIHKDFHATVERMTLIDKISFTMIHFVDTLKMWHRLPVFLGLFYLAIRRHLHQQYNLINVGRTPTGVRSNPADYPYRTADGKYNDPFNDASGSEFSFFGRNMMPVDQNNELTKPDPMVVATKLLARKKFIDTGKQFNMIAVAWIQFMIHDWIDHLEETQQIELKAPEEVASECPLKSFKFYKSKKTSTGFYEIKTGHLNRRTPWWDGSVIYGSDEDVLKKVRTFKDGKLKLSADGLLEQDSNGKIISGDVRNPWAGLLALQALFVHEHNLVCDTLKKEYPELEDEDLYRHARLVTSAVIAKIHTIDWTVELIKTDTLLAGMRANWYGLLGKRFKDVFGHVGGSILGGIVGMKKPQNYGVPYSLTEEFTSVYRMHQLLPEKLQLRNVDAAPGPNKSLPLINEIPMEDLIRVKGEEHLSKVGFIKQMVSMGHQASGALELWNYPVWMRNLIAQDVDGTDRPDHVDLAALEIYRDRERNVARYNEFRRRMLQIPISKWEDLTDDEEAIKTLREVYGDNVEEMDLLVGMAAEKKLKGFAISETAFFIFLLMASRRLEADRFFTSNYNEETYTKKGLEWANTTESLKDVLDRHYPGMTEKWMNSNSAFSVWDSSPEPPNPIPIYFRIPKQ

SEQ ID NO: 211 - protein, 614 aa, Capsicum chinense
MTLNDKISFLIVHVIDKHNLWHRLPVFFGLVYLGLRRHLNQEYNLINVGRTPTGVRSNPEDYPYRTADGKYNDPFNEGAGSEFSFFGRNMMPVDQHDKLKNPDPMVVATKLLARRNFLDTGKQFNMIAASWIQFMIHDWIDHLEDTQQIELTAPEEVASQCPLKSFKFYKSKETPTGFYEIQTGHLNRRTPWWDGSAVYGSNAEVLKKVRTYKDGKLKLSADGLLEQDENGKIISGDVRNTWAGLLALQALFVQEHNLVCDVLKKEYPELEDEDLYRHARLVTSAVIAKVHTIDWTVELLKTDTLLAAMRTNWYGLLGKKIKDTFGHIGGGGVLGGLVGMKKPQNHGVPYSLTEEFVSVYRMHQLLPDTLQLRNIDATPGPNKSLPLTNEIPMKDLIGGKGEENLSRIGFTKQMVSMGHQACGALELWNYPIWMRDLIPEDVDGTDRSDHVDLAALEIYRDRERSVARYNEFRRRMLQIPISKWEDLTDDEEAIKTLHEVYGNDVEALDLLVGMAAEKKIKGFAISETAFVIFLLMASRRLEADRFFTSNYNEETYTKRGLKWVNTTETLKDVLDRHYPEMTKKWMNSTSAFSVWDSSSETHNPIPLYFRVPQH

SEQ ID NO: 212 - protein, 643 aa, Cajanus cajan
MWSVVTDPIRALVTRVLHHIIHKDFHEAVAKMTIIDAFLFLIVHSIDKLGIWPRLPVFLGLVYLAIRRHLHQEYNLFNVGTTPVGVRFNHSDFPYRTADGKYNDPFNEAAGSQGTFFGRNILPVDQKKKLLKPDPMVVATKLLARKTYKDTGKQFNVIAASWIQFMIHDWIDHLEDTNQIELIAPREVASQCPLKSFKFYKTKEFPTGFYEIKTGALNIRTPWWDGSAIYGSNGEVLAKLRTFKDGKIKISKDGHLLHNQNGTAIAGDIRNSWAGVSTLQALFVQEHNAVCDALKKNYPELEDEELYRHARLVTSAVIAKVHTIDWTVELLKTDTLLAGMRGNWYGILGKKFKDTFGHVGGAILGGLVGLKRPENHGVTYSLTEEFVSVYRMHSLLPDNLQLRDISATPGPNKSPPLIKEIPMKNLIGLQGEQTLTEIGVARQLVSMGHQACGALELWNYPLWLRDLVSQNVDGTERPDHVDLAALEIYRDRERSVARYNQFRRALLLIPITKWEDLTDDKEAIQVLEEVYGDDVEELDTLVGLMAEKKIKGFAISETAFIIFLLMASRRLEADRFFTSNFNEETYTKKGLEWVNTTESLKDVIDRHYPEMTHKWLNSTSAFSVWDSPPNTHNPVPLYLRVPH

SEQ ID NO: 213 - protein, 641 aa, Capsicum annuum; identical to SEQ ID NO: 154

SEQ ID NO: 214 - protein, 613 aa, Cajanus cajan
MTLLDTLLFLVVHYIDRFGVWHRMPVILGLIYLATRRHIHQQYNLINVGIHPVNVRNNPEDYPYRKQDGSYNDPFQGAGGYKTFFGRNMLPSTQNDKLLKPDPIVVATKLLARRNYKDTGKQFNIVASSWIQFMIHDWVDHLEETSQMNELTAPESVASQCPLRSFKFLKTKEVSTGFFGIPKGHLNIRTSWWDASVVYGSYKERQDRVRSYQDGKLKIAENGLLARDDDGIAICGDVRNSWVGVSTLQALFIKEHNAVCDAIKAEDPSLSDEDLYRYGRLVVSAVIAKVHTIDWTVELLKTDTMLAGMRANWYGLLGKEFKDQYGHVGGAILGGLVGMRKPVNYGVPYSLTEEFVGVYRMHSLLPDSLQYRDISASPGPNKQPPLLQEVPMKDLIGHKGEMALDKIGFEKQMVSMGHQACGALELWNYPIWLRDLVVHDEDAKERPHNVDLAALEVYRDRERNVARYNEFRRGLLLLPIEKWEDLTDDKEAVEVLKEVYGDDNVEDLDLLVGLMAEKKIKGFAISETAFVIFLLMATRRLEADKFFTSHYNEETYTKTGLAWVNSTESLKDVIDRHYPGLTQKWMNCESAFSVWDSPPKPRNTTPLYFRIPN

SEQ ID NO: 215 - protein, 643 aa, Capsicum annuum
MSFIMSSLRNLFLSPLRSFIQKDFHDAFDSMTLLDKLLFMMVHFVDKLILWHRLPVFLGLAYLAARRHLHQEYNLINVGRTPTGVRSNPEDYPYRTADGKYNDPFNEGAGSQFSFFGRNVMPVDQHDKLKKPDPMVVATKLLARKNFMDTGKQFNMIAASWIQFMIHDWIDHLEDTHQIELRAPEEVASECPLKSFKFYKSKKTPTGFYEIKTGYLNRRTSWWDGSAIYGSNTEALKKVRTFEDGKLKLSADGLLEQDENGNIISGDVRNPWAGLLALQALFIQEHNLVCDTLKKEYPKLEDEDLYRHARLVTSAVIAKVHTIDWTVELLKTDTLLAGMRANWYGLLGKKFKDTFGHVGGSSLGGFVGMKKPENHGVPYSLTEEFVSVYRMHQLLPDTLQLRNIDATPGPNKSLPLTNEIPMEDLIGGKGEENLSRIGYTKQMVSMGHQACGALELMNYPIWMRDLIPQDVDGNDRPDHIDLAALEIYRDRERSVARYNEFRRRMLQIPISKWEDLTDDEEAIKMLREVYGDDVEELDLLVGMSAEKKIKGFAISETAFFIFLIMASRRLEADKFFTSNYNEETYTKKGLEWVNTTESLKDVLDRHYPEMTGKWMNSNSAFSVWDSSPEPHNPIPIYFRVPQQ

SEQ ID NO: 216 - protein, 669 aa, Capsicum annuum
MYMYPKAYIEHPITYNICFQLSYKLGNMTLVMLRNLLFSPLRGLIHKDFHEILDKMTLNDKISFLIVHVIDKHNLWHRLPVFFGLVYLGLRRHLNQEYNLINVGRTPTGVRSNPEDYPYRTADGKYNDPFNEGAGSEFSFFGRNMMPVDQHDKLKNPDPMVVATKLLARRNFLDTGKQFNMIAASWIQFMIHDWIDHLEDTQQIELTAPEEVASQCPLKSFKFYKSKETPTGFYEIQTGHLNRRTPWWDGSAVYGSNAEVLKKVRTYKDGKLKLSADGLLEQDENGKIISGDVRNTWAGLLALQALFVQEHNLVCDVLKKEYPELEDEDLYRHARLVTSAVIAKVHTIDWTVELLKTDTLLAAMRTNWYGLLGKKIKDTFGHIGGGGVLGGLVGMKKPQNHGVPYSLTEEFVSVYRMHQLLPDTLQLRNIDATPGPNKSLPLTNEIPMKDLIGGKGEENLSRIGFTKQMVSMGHQACGALELWNYPIWMRNLIPEDVDGTDRSDHVDLAALEIYRDRERSVARYNEFRRRMLQIPISKWEDLTDDEEAIKTLHEVYGNDVEALDLLVGMAAEKKIKGFAISETAFVIFLLMASRRLEADRFFTSNYNEETYTKRGLKWVNTTETLKDVLDRHYPEMTKKWMNSTSAFSVWDSSSETHNPIPLYFRVPQH

SEQ ID NO: 217 - protein, 643 aa, Capsicum annuum; identical to SEQ ID NO: 136

SEQ ID NO: 218 - protein, 591 aa, Mycolicibacterium peregrinum
MPSLLTRLFLKTTELVDRRIGWDKLPPIVGISVLVGIRDSLREHNLYDTYQGKPPEAPPLAPTDYLTARTANGSYNDLSAPSMGMADTRFGRNVPLAEGRAETLPQLMDPNPRLISTKLLQRREFKPATTLNVLAGAWLQFETRDWFSHGTDANRMLEIPRPDGDDEWPEDTIKVPATAVDPTAAPGGSTFVNTETHWWDASQIYGSNQDFQKAVRSGKGGKVRIDADGFIDIDPALIGASGGADGWWLGMELMGTIFMREHNAICDRLRAAYPNWDDDQLFNKARLINAALIAKIHTIEWTPAILGHPTLQIGMRANWFGLAGERVKELFGRIGSSDVVSGIPGSTTDHHTAPYSITEDFVTVYRMHPLVPDDYEFLSLTTGVEPRQLTFGEIHGGANSRGVLKSMGVAECLYSLGVAHPGAVTLHNSPNFMRNFQRTDEHTLDMIATDILRSRERGVPRYNDFRRALRLNPVTSFDQISGGDASTAAVMAEIYGGDIEKVDTTVGMFGEKLPEGFGFSDTAFRIFVLMATRRLKSDRFYTVDFTPRVYTPEGMDWIDHNDMTSVLLRHYPELEPSLRGQRNAFAPWARI

SEQ ID NO: 219 - protein, 591 aa, Mycolicibacterium boenickei
MPSLLTRLFLKTAELVDRRIGWDKLPPILGISVLVGIRDALREHNLYDTYQGNPPEAPALDPIDYLTNRTANGTYNDLSAPSMGMANTRFGRNVPLAEGRAETLPQLMDPNPRLISTKLLQRREFRPATTLNVLAGAWLQFETRDWFSHGTDANRMLEIPLPEGDTEWPDDTIKVPATIADPTAAPGGSTFVNTETHWWDASQIYGSNQDFQNAIRSHRDGKVRIDADGFIDIDPALIGASGGADGWWLGMELMGTIFMREHNAICDRLKAAYPQWSDEQLFNKARLINAALIAKIHTIEWTPAILGHPTLQIGMRANWFGLAGERVRELFGRLGSSDVLSGIPGSTTDHHTAPYSITEDFVTVYRMHPLVPDDYEFLSLTTGVEPRNLTFNEIHGGANSRGVLKSVGVAECLYSLGVAHPGAVTLHNSPNFMRSFQRTDEHTLDMIATDILRSRERGVPRYNDFRRALRLNPVTSFDQISGGDAATAAVMAEIYGGDIEKVDTTVGMFGEQLPEGFGFSDTAFRIFVLMATRRLKSDRFYTVDFTPRVYTHEGMDWIDRNDMTSVLLRHYPELEPSLRGQRNAFAPWARI

SEQ ID NO: 220 - protein, 592 aa, Mycolicibacterium fortuitum
MPKPSLLMRLFLTTTELIDRRIGWDKLPPVLGVAVLVGIRDALREHNLYDTCQGAPPEADPLPPSDYLTVRTANGSYNDLSAPSMGMANTRFGRNVPLTEGHSEQLPELMDPNPRLISTKLLQRRAFRPATTLNVLAAAWLQFETRDWFSHGSDPNRMLEIPRPPEDDWPEETIKVPATAVDPTANPGGSTFLNTETHWWDGSQIYGSNQQFQDAIRTHHDGKVCIDADGFIDIPPTLIGAAGGADGWWLGMELMGTIFMREHNAICDRLKAAYPNWNDDQLFNKARLINAALIAKIHTIEWTPAILGHPTLQIGMRANWFGLAGERVKELFGRLSAGDLLSGIPGSNTDHHTAPYSITEDFVTVYRMHPLVPDDYEFLSLTSGVEPRALTFSDIHGGANSRGVLKSQGVAECLYSLGVAHPGAVTLHNSPTFMRDFERVDEHALDMIATDILRSRERGVPRYNDFRRALRLAPAMSFDEISGGDAATAAVMAEIYGGDIEKVDTMVGMFGEKLPEGFGFSDTAFRIFVLMASRRLKSDRFYTVDFTPRVYTPEGMDWIDRNDMVSVLLRHYPELEPALRGQRNAFAPWTRL

SEQ ID NO: 221 - protein, 591 aa, Mycolicibacterium peregrinum
MPTLLTRLFLKTTELVDRRIGWNKLPPILGISVLVGIRDALREHNLYDTYQGRPPEAPTVEPTDYLTVRTANGSYNDLSAPSMGMANTRFGRNVPPAEGHPETLPELMDPNPRLISTKLLQRREFQPATTLNVLAAAWLQFETRDWFSHGTDPNRMLEIPRPDGDTEWPDATIKVPATAVDPTAAPGGSTFVNTETHWWDASQIYGSNEDFQKAIRSGKDGKVRIDADGFIDIDPALIGASGGADGWWLGMELMGTIFMREHNAICDRLKAAYPSWDDDQLFNKARLINAALIAKIHTIEWTPAILGHPTLQIGMRANWFGLAGERVKELFGRIGSSDVVSGIPGSTTDHHTAPYSITEDFVTVYRMHPLVPDDYEFLSLTTGVEPRRLTFGEIHGGANSRGVLKSMGVAECLYSLGVAHPGAVTLHNSPNFMRSFQRTDEHTLDMIATDILRSRERGVPRYNDFRRALRLNPVTSFDQISGGDASTAAVMAEIYGGDIEKVDTTVGMFGEKLPEGFGFSDTAFRIFVLMATRRLKSDRFYTVDFTPRVYTPEGMDWIDHNDMTSVLLRHYPELEPSLRGQRNAFAPWARI

SEQ ID NO: 222 - protein, 592 aa, Mycolicibacterium fortuitum
MPKPSLLMRLFLKTTELIDRRIGWDKLPPVLGVAVLVGIRDALREHNLYDTCQGAPPEADPLPPSDYLTVRTANGSYNDLSAPSMGMANTRFGRNVPLAEGHAEQLPDLMDPNPRLISTKLLQRREFRPATTLNVLAAAWLQFETRDWFSHGSDPERMLEIPRPPEDEWPEDTIKVPATTADPTAASGGSTFLNTETHWWDASQIYGSNQQFQDTIRTHHEGKVRIDADGFIDIPPTAIGAAGGADGWWLGMELMGTIFMREHNAICDRLKAAYPNWNDDQLFNKARLINAALIAKIHTIEWTPAILGHPTLQIGMRANWFGLAGERVKELFGRLSSGDLLSGIPGSNTDHHTAPYSITEDFVTVYRMHPLVPDDYEFLSLTSGTEPRTLTFSDIHGGANSRGVLKSQGIAECLYSLGVAHPGAVTLHNSPTFMRDFERVDEHALDMIATDILRSRERGVPRYNDFRRALRLTPATSFDEISGGDAATAAVMAEIYGGDIEKVDTMVGMFGEKLPEGFGFSDTAFRIFVLMASRRLKSDRFYTVDFTPRVYTPEGMDWIDRNDMVSVLLRHYPELEPALRGQRNAFAPWTRL

SEQ ID NO: 223 - protein, 604 aa, Mycobacterium sp.
MRALLMRSFIKATEIIDRRIGWDKLPPWIGIGVLVGIRDALREHNLYDTYAGDPPPAPAHAPAEYLTNRTADGSYNDLAEPSMGMAGTRFGRNVPLPLARAEQPPRLIDPNPRVISNELMRRDTFKPATTLNILAAAWLQFETRDWFSHDTDPSKMIEIPVPEGDDWEVNGDRASIRIPSTLADPTALPGQQPTTFINKETHWWDASQIYGSNQAFQDAIRTDKKDNDGKVRVSADGLIDIDPSLIGASGGEDGWWLGLELMGTIFMREHNAICDRLRAAYPTWSGDQIFNKARMINAALIAKIHTIEWTPAILGHPTLQIGMRANWFGLAGEKVGQLVGRIGSGDLISGILGSETEHHSAPYSITEDFVTVYRMHPLIPDDYDFVSITGKSGPQRLSFDDIHGGANSRGVLKRMGPADCLYSLGIAHPGAVTLHNSPNFMRRFDRTDGNTIDLIATDIIRSRERGVPRYNEFRRQLRLKEATSFDEISNGDPATAAKLREIYGGDIDKVDAMVGMFGEKLPDGFGFSDTAFRIFVLMATRRLKSDRFFTVDFTPRVYTPEGIAWIADNDMGSVLLRHYPELAPVLCQQKNAFAPWPHVGKARR

SEQ ID NO: 224 - protein, 596 aa, Mycolicibacterium conceptionense
MPGPSLLTRLFLKTTELVDRRVGWDKLPPFLGISVLVGIRDALREHNLYDAYEGNPPQAPPLDPTEYLTNRTADGTYNDLSVPSMGMANTRFGRNVPLAEGRAETLPELMDPNPRLISTKLLQRREFQPSTTLNVLAGAWLQFETRDWFSHGTDANRMLEIPRPDGDDEWPEDTIKVPATPADPTADQNDTTCSTFLNTETHWWDASQIYGSNQEFQNAIRSHHDGKVRIDADGFIDIDPALIGASGGADGWWLGMELMGTIFMREHNAICDRLKAAYPQWSDDQLFNKARLINAALIAKIHTIEWTPAILGHPTLQIGMRANWFGLAGERVKELFGRLGSSDILSGITGSTTDHHTAPYSITEDFVTVYRMHPLVPDDYEFLSLTPGVEPRTLTFSEIHGGANSRGVLKSIGAAECLYSLGVAHPGAVTLHNSPTFMRSFQRTDEHTLDMIATDILRSRERGVPRYNDFRRALRLAPATSFDQISGGDASTAAVMAEIYGGDIEKVDTMVGMFGEKLPEGFGFSDTAFRIFVLMATRRLKSDRFYTVDFTPRVYTPEGMDWIDHNDMTSVLLRHYPELGPSLRGQRNAFAPWARI

SEQ ID NO: 225 - protein, 597 aa, Mycolicibacterium wolinskyi
MPSLLTRWSIKVSEAVDRRIGWDKLPPWLGLGALIGIRDALREHNLYDSYQGKPPAAPDHKPAEYLTVRTVDGSYNDLATPSMGMANTRFGRNVPLDKGHAETMPRLMDPNPRVISNELLRRHEFKPAETLNVLAAAWLQFETRDWFSHDTDPKKMIEIPVPEGDTEWSGDTINIPSTPADPDPTPGHTTFINTETHWWDASQIYGSNPEFQAAIRTDRNDGKVRIDADGFIELDPKLLGASGGADGWWLGLELMGTIFLREHNAICDRLKAAYPTWTGDQIFNKARMINAALIAKIHTIEWTPAILGHPTLQIGMRANWFGLAGERVKELFGRVSSSEAVSGVLGSATDHHSAPYSITEDFVTVYRMHPLVPDDYEFLSLSGAAEPQHLSFDSIRGGANSRGVLKSVGVANCLYSLGVAHPGAVTLHNSPNFMRRFDRTDNLVIDLISTDLIRSRERGVPRYNEFRRQLRLKPATSFEEISGGCLETAVKMREIYGGDIEKVDAMVGMFGEKLPKGFGFSDTAFRIFVLMATRRLKSDRFFTVDFTPRVYTPEGMAWIDENDMCSVLIRHYPELEPVLRGQKNAFAPWARLSKAKR

SEQ ID NO: 226 - protein, 592 aa, Mycolicibacterium porcinum
MPSLLTRLFLKTTEVVDRRIGWDRLPPILGISVLVGIRDALREHNLYDTYHGNPPEAPALDPTDYLTNRTANGTYNDLSAPSMGMANSRFGRNVPLAEGRAETLPQLMDPNPRLISTKLLQRREFRPATTLNVLAGAWLQFETRDWFSHGTDANRMLEIPLPDGDTEWPDDTIKIPATTADPTAAPDGSTFLNTETHWWDASQIYGSNQDFQNAIRSHRDGKVRIDADGFIDIDPALIGASGGADGWWLGMELMGTIFMREHNAICDRLKAAYPQWSDDQLFNKARLINAALIAKIHTIEWTPAILGHPTLQIGMRANWFGLAGERVKELFGRLSSSDVLSGIPGSTTDHHTAPYSITEDFVTVYRMHPLVPDDYEFLSLTTGVEPRTLTFSEIHGGANSRGVLKSMGVAECLYSLGVAHPGAVTLHNSPNFMRSFQRTDEHTLDMIATDILRSRERGVPRYNDFRRALRLNPVTSFDQISGGDASTAAVMAEIYGGDIEKVDTTVGMFGEKLPEGFGFSDTAFRIFVLMATRRLKSDRFYTVDFTPRVYTPEGMDWIDHNDMTSVLLRHYPELEPALRGQRNAFAPWARIH

SEQ ID NO: 227 - protein, 596 aa, Mycolicibacterium conceptionense
MPGPTLLTRLFLKTTELVDRRVGWDKLPPFLGISVLVGIRDALREHNLYDAYEGNPPQAPPLDPTEYLTNRTADGTYNDLSVPSMGMANTRFGRNVPLAEGRAEMLPELMDPNPRLISTKLLQRREFQPATTLNVLAGAWLQFETRDWFSHGTDANRMLVIPRPDGDDEWPEDTIKVPATPADPTADQNDTTCSTFLNTETHWWDASQIYGSNQEFQNAIRSHHDGKVRIDADGFIDIDPALIGASGGADGWWLGMELMGTIFMREHNAICDRLRAAYPQWSDDQLFNKARLINAALIAKIHTIEWTPAILGHPTLQIGMRANWFGLAGERVKELFGRLGSSDILSGITGSTTDHHTAPYSITEDFVTVYRMHPLVPDDYEFLSLTPGVEPRTLTFSEIHGGANSRGVLKSIGAAECLYSLGVAHPGAVTLHNSPTFMRSFQRTDEHTLDMIATDILRSRERGVPRYNDFRRALRLAPATSFDQISGGDASTAAVMAEIYGGDIEKVDTMVGMFGEKLPEGFGFSDTAFRIFVLMATRRLKSDRFYTVDFTPRVYTPEGMDWIDHNDMTSVLLRHYPELGPSLRGQRNAFAPWARI

SEQ ID NO: 228 - protein, 585 aa, Mycolicibacterium fortuitum
MRLFLTTTELIDRRIGWDKLPPVLGVAVLVGIRDALREHNLYDTCQGAPPEADPLPPSDYLTVRTANGSYNDLSAPSMGMANTRFGRNVPLTEGRSEQLPELMDPNPRLISTKLLQRRAFRPATTLNVLAAAWLQFETRDWFSHGSDPNRMLEIPRPPDDDWPEDTIKVPATAVDPTAEPGGSTFLNTETHWWDGSQIYGSNQQFQDAIRTHHDGKVCIDADGFIDIPPTLIGAAGGADGWWLGMELMGTIFMREHNAICDRLKAAYPNWNDDQLFNKARLINAALIAKIHTIEWTPAILGHPTLQIGMRANWFGLAGERVKELFGRLSAGDLLSGIPGSNTDHHTAPYSITEDFVTVYRMHPLVPDDYEFLSLTSGIEPRALTFSEIHGGANSRGVLKSQGVAECLYSLGVAHPGAVTLHNSPTFMRDFERVDEHALDMIATDILRSRERGVPRYNDFRRALRLAPATSFDEISGGDAATAAVMAEVYGGDIEKVDTMVGMFGEKLPEGFGFSDTAFRIFVLMASRRLKSDRFYTVDFTPRVYTPEGMDWIDRNDMVSVLLRHYPELEPALRGQRNAFAPWRRL

SEQ ID NO: 229 - protein, 591 aa, Mycolicibacterium peregrinum
MPWLLTRLFLKTTELIDRRIGWDKLPPILGISVLVGIRDALREHNLYDTYQGRPPEAPTVEPTDYLTVRTADGSYNDLSVPSMGMANTRFGRNVPPAEGHAETLPELMDPNPRLISTKLLQRREFQPATSLNVLAAAWLQFETRDWFSHGTDPNRMLEIPRPDGDTEWPEATIKVPATAVDPTAAPGGSTFVNTETHWWDASQIYGSNQDFQKAIRSGKGGKVRIDADGFIDIDPALIGASGGADGWWLGMELMGTIFMREHNAICDRLKAAYPSWDDDQLFNKARLINAALIAKIHTIEWTPAILGHPTLQIGMRANWFGLAGERVKELFGRLSSSDVLSGIPGSTTDHHTAPYSITEDFVTVYRMHPLVPDDYEFLSLTTGVEPRQLTFGEIHGGANSRGVLKSMGVAECLYSLGVAHPGAVTLHNSPNFMRNFQRTDEHTLDMIATDILRSRERGVPRYNDFRRALRLNPVTSFDQISGGDAATAAVMAEIYGGDIEKVDTTVGMFGEKLPEGFGFSDTAFRIFVLMATRRLKSDRFYTVDFTPRVYTPEGMDWIDHNDMTSVLLRHYPELEPSLRGQRNAFAPWARI

SEQ ID NO: 230 - protein, 604 aa, Mycobacterium goodii
MRALLMRSFIKATEIIDRRIGWDKLPPWIGIGVLIGIRDALREHNLYDTYAGDPPPAPAHAPAEYLTNRTADGSYNDLAEPSMGMAGTRFGRNVPLPLARAEQPPRLIDPNPRVISNELMRRDTFKPATTLNILAAAWLQFETRDWFSHDTDPSKMIEIPVPEGDDWEVNGDRASIRIPSTLADPTALPGQQPTTFINKETHWWDASQIYGSNQAFQDAIRTDKKDNDGKVRVSADGLIDIDPSLIGASGGEDGWWLGLELMGTIFMREHNAICDRLRAAYPTWSGDQIFNKARMINAALIAKIHTIEWTPAILGHPTLQIGMRANWFGLAGEKVGQLVGRIGSGDLISGILGSETEHHSAPYSITEDFVTVYRMHPLIPDDYDFVSITGKSGPQRLSFDDIHGGANSRGVLKRMGPADCLYSLGIAHPGAVTLHNSPNFMRRFDRTDGNTIDLIATDIIRSRERGVPRYNEFRRQLRLKEATSFDEISNGDPATAAKLREIYGGDIDKVDAMVGMFGEKLPDGFGFSDTAFRIFVLMATRRLKSDRFFTVDFTPRVYTPEGIAWIADNDMGSVLLRHYPELAPVLCQQKNAFAPWPHVGKARR

SEQ ID NO: 231 - protein, 607 aa, Mycobacterium syngnathidarum
MSSLLTRWFIKATEIVDRRIGWDKLPPWIGLSVLIGVRDALREHNLYDTYRGDPPAAPTHDPADYLTVRTVDGSYNDLSAPSMGMANTRFGRNVPLDKGHGEQPPHLMDPNPRLVGNELLQRGDEFKPATTLNVLAAAWLQFETRDWFSHGTDPTKMIEIPLPEGEADWDVKGDGPAIRIPSTPADPTADQNDTTCPTFLNTETHWWDASQIYGSNQQFQDAIRTPKQANDGKVRIDADGFIDLDPNLLGESGGADGWWLGLELMGTIFLREHNAICDRLKAAYPAWSGDQIFNKARMINAALIAKIHTIEWTPAILGHPTLQIGMRANWFGLAGERVKELIGRVSSSETISGVLGSATDHHSAPYSITEDFVTVYRMHPLVPDKYEFLNVSGAAAPQELSFDSIHGGANSRGVLKSMGVGNCLYSLGVAHPGAVTLHNSPNFMRRFDRTDGHVIDLISTDIIRSRERGVPRYNEFRRQLRLKPATSFDEISGGSKETAAKMKKIYGGDIEKVDAMVGMYGEKLPKGFGFSDTAFRIFVLMATRRLKSDRFFTVDFTPRVYTPEGMAWIDENDMCSVLIRHYPELEPVLREQRNAFAPWPRLGQAKP

SEQ ID NO: 232 - protein, 597 aa, Mycolicibacterium wolinskyi
MPSLLTRWSIKVSEAVDRRIGWDKLPPWLGLGALIGIRDALREHNLYDSYQGKPPAAPDHKPAEYLTVRTVDGSYNDLAAPSMGMANTRFGRNVPLDKGHAETMPRLMDPNPRVISNELLRRHEFKPAETLNVLAAAWLQFETRDWFSHDTDPKKMIEIPVPEGDTEWSGDTINIPSTPADPDPTPGHTTFINTETHWWDASQIYGSNPEFQAAIRTDRNDGKVRIDADGFIELDPKLLGASGGADGWWLGLELMGTIFLREHNAICDRLKAAYPTWTGDQIFNKARMINAALIAKIHTIEWTPAILGHPTLQIGMRANWFGLAGERVKELFGRVSSSEAVSGVLGSATDHHSAPYSITEDFVTVYRMHPLVPDDYEFLSLSGAAEPQQLSFDSIRGGANSRGVLKSVGVANCLYSLGVAHPGAVSLHNSPNFMRRFDRTDNLVIDLISTDLIRSRERGVPRYNEFRRQLRLKPATSFEEISGGCLETAVKMREIYGGDIEKVDAMVGMFGEKLPKGFGFSDTAFRIFVLMATRRLKSDRFFTVDFTPRVYTPEGMAWIDENDMCSVLIRHYPELEPVLRGQKNAFAPWARLSKAKR

SEQ ID NO: 233 - protein, 591 aa, Mycobacterium vulneris
MPSLLTRLFLKTTEVVDRRIGWDKLPPILGISVLVGIRDALREHNLYDTYQGNPPQAPAVEPTDYLTNRTANGTYNDLSAPSMGMANTRFGRNVPLAEGRAETLPQLMDPNPRLISTKLLQRREFRPATTLNVLAGAWLQFETRDWFSHGTDANRMLEIPRPDGDTEWPDDTIRVPATVADPTAAPGGSTFLNTETHWWDASQIYGSNQDFQNAIRSHHDGKVRIDADGFIDIDPALIGAAGGADGWWLGMELMGTIFMREHNAICDRLKSAYPQWSDEQLFNKARLINAALIAKIHTIEWTPAILGHPTLQIGMRANWFGLAGERVKELFGRLGPSDVLSGIPGSTTDHHTAPYSITEDFVTVYRMHPLVPDDYEFLSLATGVEPRTLTFSEIHGGANSRGVLKSVGVAECLYSLGVAHPGAVTLHNSPNFMRNFQRTDEHTLDMIATDILRSRERGVPRYNDFRRALRLKPVTSFDQISGGDAATAAVMAEIYGGDIEKVDTTVGMFGEKLPEGFGFSDTAFRIFVLMATRRLKSDRFYTVDFTPRVYTPEGMDWIDHNDMTSVLLRHYPELEPALRGQRNAFAPWARI

SEQ ID NO: 234 - protein, 591 aa, Mycolicibacterium porcinum
MPSLLTRLFLKTTEVVDRRIGWDKLPPILGISVLVGIRDALREHNLYDTYQGNPPQAPAAEPTDYLTNRTANGTYNDLSAPSMGMANTRFGRNVPLPEGRAETLPQLMDPNPRLISTKLLQRREFRPATTLNVLAGAWLQFETRDWFSHGTDANRMIEIPRPDGDTEWPDDTIRVPATVADPTAAPGGSTFLNTETHWWDASQIYGSNQDFQNAIRSHHDGKVRIDADGFIDIDPALIGAAGGADGWWLGMELMGTIFMREHNAICDRLKSAYPQWSDEQLFNKARLINAALIAKIHTIEWTPAILGHPTLQIGMRANWFGLAGERVKELFGRLGPSDVLSGIPGSTTDHHTAPYSITEDFVTVYRMHPLVPDDYEFLSLATGVEPRTLTFSEIHGGANSRGVLKSVGVAECLYSLGVAHPGAVTLHNSPNFMRNFQRTDEHTLDMIATDILRSRERGVPRYNDFRRALRLKPVTSFDQISGGDAATAAVMAEIYGGDIEKVDTTVGMFGEKLPEGFGFSDTAFRIFVLMATRRLKSDRFYTVDFTPRVYTPEGMDWIDHNDMTSVLLRHYPELAPALRGQRNAFAPWARI

SEQ ID NO: 235 - protein, 604 aa, Mycolicibacterium neworleansense
MPSLPTRIFIKVTEVVDRRIGWDKLPPWLGLSVLIGIRDALREYNLKDTYGGNPPPAPHHAPADYLTVRTVDGSYNDLSAPSMGMAGTRFGRNVSLDKGHAEQPPHLMDPNPRLIGNELLQRGDDFKPAITLNVLAAAWLQFETRDWFSHDTDPSKMIEIPLPEGETDWDIKEDGPAIQIPSTPADPNPTPGETTFLNTETHWWDASQIYGSNQLFQDAIRTPKEANDGKVRIDADGFIELDPKLLGESGGADGWWLGLELMGTIFLREHNAICDRLKAAYPTWSGDQIFHKARMINAALIAKIHTIEWTPAILGHPTLQIGMRANWFGLAGERVKELIGRVSSSEAISGVLGSATEHHAAPYSITEDFVTVYRMHPLVPDKYEFLNLAGAAAPQELSFDSIHGGANSRGVLKSVGVGNCLYSLGVAHPGAVTLHNSPNFMRRFDRTDGHVIDMISTDIIRSRERGVPRYNEFRRQLRLKPATSFDEISGGSKETAAKMREIYGGDIEKVDAMVGMYGEKLPKGFGFSDTAFRIFVLMATRRLKSDRFFTVDFTPRVYTPEGMAWIDENDMCSVLIRHYPELEPVLREQRNAFAPWPRIGKATP

SEQ ID NO: 236 - protein, 530 aa, Mycolicibacterium senegalense
MPGPSLLTRLFLKTTELVDRRVGWDKLPPFLGISVLVGIRDALREHNLYDAYEGNPPQAPPLDPTEYLTNRTADGTYNDLSVPSMGMANTRFGRNVPLAEGRAETLPELMDPNPRLISTKLLQRREFQPATTLNVLAGAWLQFETRDWFSHGTDANRMLEIPRPDGDDEWPEDTIKVPATPADPTAEPGGSTFLNTETHWWDASQIYGSNQDFQNAIRTHHDGKVRIDADGFIDIDPALIGASGGADGWWLGMELMGTIFMREHNAICDRLKAAYPQWSDDQLFNKARLINAALVAKIHTIEWTPAILGHPTLQIGMRANWFGLAGERVKELFGRLGSSDILSGITGSTTDHHTAPYSITEDFVTVYRMHPLVPDDYEFLSLTPGAEPRTLTFSEIHGGANSRGVLKSIGAAECLYSLGVAHPGAVTLHNSPTFMRSFQRTDEHTLDMIATDILRSRERGVPRYNDFRRALRLAPATSFDQISGGDASTAAVMAEIYGGDIEKVDTMVGMFGENCRKGSDSVTPHSGSSC

SEQ ID NO: 237 - protein, 585 aa, Mycolicibacterium fortuitum
MRLFLTTTELIDRRIGWDKLPPVLGVAVLVGIRDALREHNLYDTCQGAPPEADPLPPSDYLTVRTANGSYNDLSAPSMGMANTRFGRNVPLTEGRSEQLPELMDPNPRLISTKLLQRRAFRPATTLNVLAAAWLQFETRDWFSHGSDPNRMLEIPRPPDDDWPEDTIKVPATAVDPTAEPGGSTFLNTETHWWDGSQIYGSNQQFQDAIRTHHDGKVCIDADGFIDIPPTLIGAAGGADGWWLGMELMGTIFMREHNAICDRLKAAYPNWDDDQLFNKARLINAALIAKIHTIEWTPAILGHPTLQIGMRANWFGLAGERVKELFGRLSAGDLLSGIPGSNTDHHTAPYSITEDFVTVYRMHPLVPDDYEFLSLTSGVEPRALTFSDIHGGANSRGVLKSQGVAECLYSLGVAHPGAVTLHNSPTFMRDFERVDEHALDMIATDILRSRERGVPRYNDFRRALRLAPATSFDEISGGDAATAAVMAEVYGGDIEKVDTMVGMFGEKLPEGFGFSDTAFRIFVLMASRRLKSDRFYTVDFTPRVYTPEGMDWIDRNDMVSVLLRHYPELEPALRGQRNAFAPWRRL

SEQ ID NO: 238 - protein, 591 aa, Mycolicibacterium peregrinum
MPSLLTRLFLKTTELIDRRIGWDKLPPILGISVLVGVRDALREHNLYDTYRGRPPEAPTVEPTAYLTVRTANGSYNDLSVPSMGMANTRFGRNVPPAEGHAETLPELMDPNPRLISTKLLQRREFQPATTLNVLAAAWLQFETRDWFSHGTDPNRMLEIPRPDGDTEWPEATIKVPATAVDPTAAPAGSTFVNTETHWWDASQIYGSNQDFQNAIRSGKGGKVRIDADGFIDIDPALIGASGGADGWWLGMELMGTIFMREHNAICDRLKAAYPSWDDDQLFNKARLINAALIAKIHTIEWTPAILGHPTLQIGMRANWFGLAGERVKELFGRLSSSDVLSGIPGSTTDHHTAPYSITEDFVTVYRMHPLVPDDYEFLSLTTGVEPRQLTFGEIHGGANSRGVLKSMGVAECLYSLGVAHPGAVTLHNSPNFMRNFQRTDEHTLDMIATDILRSRERGVPRYNDFRRALRLNPVTSFDQISAGDASTAAVMAEIYGGDIEKVDTTVGMFGEKLPEGFGFSDTAFRIFVLMATRRLKSDRFYTVDFTPRVYTPEGMDWIDHNDMTSVLLRHYPELEPSLRGQRNAFAPWARI

SEQ ID NO: 239 - protein, 597 aa, Mycobacterium sp.
MPSLLTRWFIKATEVVDRRIGWDKLPPWIGLGVLIGVRDALREHNLYDSYRGNPPAAPAHTPAEYLTIRTVDGSYNDLSAPSMGMAHTRFGRNVPLDGGHAEQPPHLMDPNPRAISNELLRRDTFKPATTLNILAAAWLQFETRDWFSHDTDPSRMIEIPVPDGDEWDESTIRIPSTPADPNPTPGDSTFINTETHWWDASQIYGSNQLFQDAIRTKDKKDGKVRIDADGFIDLDPSLLGASGGADGWWLGLELMGTIFLREHNAICDRLEAAYPTWSPDQIFHKARMINAALIAKIHTIEWTPAILGHPTLQIGMRANWFGLAGERVKQLFGRVSSSEAISGVVGSATDHHTAPYSITEDFVTVYRMHPLVPDDYEFLNLAGKAEPQQLPFDSIHGGANSRGVLKSVGISNCIYSLGVAHPGAVTLHNSPNFMRRFDRTDGHVIDMISTDIIRSRERGVPRYNDFRRQLRLKPATSFDEISGGDRDTALKMSEIYGGDIEKVDAMVGMFGEKLPEKFGFSDTAFRIFVLMATRRLKSDRFFTVDFTPRIYTPEGIAWIADNDMCSVLIRHYPELEPVLRGHSNAFAPWPRLGQEPR

SEQ ID NO: 240 - protein, 591 aa, Mycolicibacterium peregrinum
MPSLLTRLFLKTTELIDRRIGWDKLPPILGISVLVGIRDALREHNLYDTYQGRPPEAPTVEPTDYLTVRTADGSYNDLSVPSMGMANTRFGRNVPPAEGHAETLPELMDPNPRLISTKLLQRREFQPATTLNVLAAAWLQFETRDWFSHGTDPNRMLEIPRPDGDTEWPEATIKVPATAVDPTAAPGGSTFVNTETHWWDASQIYGSNQDFQKAIRSGKGGKVRIDADGFIDIDPALIGASGGADGWWLGMELMGTIFMREHNAICDRLKAAYPSWDDDQLFNKARLINAALIAKIHTIEWTPAILGHPTLQIGMRANWFGLAGERVKELFGRLSSSDVLSGIPGSTTDHHTAPYSITEDFVTVYRMHPLVPDDYEFLSLTTGVEPRQLTFGEIHGGANSRGVLKSMGVAECLYSLGVAHPGAVTLHNSPNFMRNFQRTDEHTLDMIATDILRSRERGVPRYNDFRRALRLNPVTSFDQISGGDAATAAVMAEIYGGDIERVDTTVGMFGEKLPEGFGFSDTAFRIFVLMATRRLKSDRFYTVDFTPRVYTPEGMDWIDHNDMTSVLLRHYPELEPPLRGQRNAFAPWARI

SEQ ID NO: 241 - protein, 596 aa, Mycolicibacterium conceptionense
MPGPTLLTRLFLKTTELVDRRVGWDKLPPFLGISVLVGIRDALREHNLYDAYEGNPPQAPPLDPTEYLTNRTADGTYNDLSVPSMGMANTRFGRNVPLAEGRAETLPELMDPNPRLISTKLLQRREFQPATTLNVLAGAWLQFETRDWFSHGTDANRMLEIPRPDGDDEWPEDTIKVPATPADPTADQNDTTCSTFLNTETHWWDASQIYGSNQEFQNAIRSHHDGKVRIDADGFIDIDPALIGASGGADGWWLGMELMGTIFMREHNAICDRLKAAYPQWSDDQLFNKARLINAALIAKIHTIEWTPAILGHPTLQIGMRANWFGLAGERVKELFGRLGSSDILSGITGSTTDHHTAPYSITEDFVTVYRMHPLVPDDYEFLSLTPGVEPRTLTFSEIHGGANSRGVLKSVGAAECLYSLGVAHPGAVTLHNSPTFMRSFQRTDEHTLDMIATDILRSRERGVPRYNDFRRALRLAPATSFDQISGGDASTAAVMAEIYGGDIEKVDTMVGMFGEKLPEGFGFSDTAFRIFVLMATRRLKSDRFYTVDFTPRVYTPEGMDWIDHNDMTSVLLRHYPELGPSLRGQRNAFAPWARI

SEQ ID NO: 242 - protein, 591 aa, Mycolicibacterium fortuitum
MPSLLTRLFLKTTELIDRRIGWDKLPPILGISVLVGIRDALREHNLYDTYQGRPPEAPTVEPTDYLTVRTANGSYNDLSVPSMGMANTRFGRNVPPAAGHAETLPELMDPNPRLISTKLLQRREFQPATTLNVLAAAWLQFETRDWFSHGTDPNRMLEIPRPDGDTEWPEATIKIPATAVDPTATPGGSTFVNTETHWWDASQIYGSNQDFQKAVRSGKDGKVRIDADGFIDIDPALIGASGGADGWWLGMELMGTIFMREHNAICDRLKAAYPNWDDDQLFNKARLINAALIAKIHTIEWTPAILGHPTLQIGMRANWFGLAGERVKELFGRIGSSDVVSGIPGSTTDHHTAPYSITEDFVTVYRMHPLVPDDYEFLSLTTGVEPRQLTFGEIHGGANSRGVLKSMGVAECLYSLGVAHPGAVTLHNSPNFMRSFQRTDEHTLDMIATDILRSRERGVPRYNDFRRALRLNPVTSFDQISGGDAATAAVMAEIYGGDIEKVDTTVGMFGEKLPEGFGFSDTAFRIFVLMATRRLKSDRFYTVDFTPRVYTPEGMDWIDHNDMTSVLLRHYPELEPSLRGQRNAFAPWARI

SEQ ID NO: 243 - protein, 597 aa, Mycolicibacterium setense
MPSLLTRWFIKATEVADRRIGWDKFPPWIGLGVLIGVRDALREHNLYDAYRGKPPAPPEHTPAEYLTIRTVDGSYNDLSAPSMGMANTRFGRNVPLDKGHAEQAPNLMDPNPRVISNELLRRDTFKPATTLNVLAAAWLQFETRDWFSHDTDPSKMIEIPVPDGDDWDESAIRIPSTLPDPHPTPGDSTFINTETHWWDASQLYGSNQLFQDAIRTKDKKDGKVRIDADGFIDLDPSLLGASGGADGWWLGLELMGTIFLREHNAVCDRLQAAYPTWTGDQIFHKARMINAALIAKIHTVEWTPAILGHPTLQIGMRANWFGLAGERVKQLFGRLSADEAISGVVGSATDHHSAPYSITEDFVTVYRMHPLVPDDYEFLNIAGKAEPQQLSFDSIHGGANSRGVLKSIGISNCIYSLGVANPGAVTLHNSPNFMRRFDRTDGHVIDMISTDIIRSRERGVPRYNDFRRQLRLKPATSFDEISGGDRDTALKMSKIYGGDIEKVDAMVGMFGEKLPEKFGFSDTAFRIFVLMATRRLKSDRFFTVDFTPRVYTPEGLAWIADNDMCSVLIRHYPELEPVLRDQRNAFAPWSRLGQGQR

SEQ ID NO: 244 - protein, 591 aa, Mycolicibacterium porcinum
MPSLLTRLFLKTTEVVDRRIGWDKLPPILGISVLVGLRDALREHNLYDTYQGNPPQAPAVEPTDYLTNRTANGTYNDLSAPSMGMANTRFGRNVPLAEGRAETLPQLMDPNPRLISTKLLQRREFRPATTLNVLAGAWLQFETRDWFSHGTDANRMLEIPRPDGDTEWPDDTIRVPATVADPTAAPGGSTFLNTETHWWDASQIYGSNQDFQNAIRSHHDGKVRIDADGFIDIDPALIGAAGGADGWWLGMELMGTIFMREHNAICDRLKSAYPQWSDEQLFNKARLINAALIAKIHTIEWTPAILGHPTLQIGMRANWFGLAGERVKELFGRLGPSDVLSGIPGSTTDHHTAPYSITEDFVTVYRMHPLVPDDYEFLSLATGVEPRTLTFSEIHGGANSRGVLKSVGVAECLYSLGVAHPGAVTLHNSPNFMRNFQRTDEHTLDMIATDILRSRERGVPRYNDFRRALRLKPVTSFDQISGGDAATAAVMAEIYGGDIEKVDTTVGMFGEKLPEGFGFSDTAFRIFVLMATRRLKSDRFYTVDFTPRVYTPEGMDWIEHNDMTAVLLRHYPELEPALRGQRNAFAPWARI

SEQ ID NO: 245 - protein, 597 aa, Mycolicibacterium setense
MPSLLTRWFIKATEVADRRIGWDKFPPWIGLGVLIGVRDALREHNLYDAYRGKPPAPPEHTPAEYLTIRTVDGSYNDLSAPSMGMANTRFGRNVPLDKGHAEQPPNLMDPNPRVISNELLRRDTFKPATTLNVLAAAWLQFETRDWFSHDTDPSKMIEIPVPDGDDWDESAIRIPSTPPDPHPTPGDSTFINTETHWWDASQLYGSNQLFQDAIRTKDKKDGKVRIDADGFIDLDPSLLGASGGADGWWLGLELMGTIFLREHNAICDRLQAAYPTWTGDQIFHKARMINAALIAKIHTVEWTPAILGHPTLQIGMRANWFGLAGERVKQLFGRLSADEAISGVVGSATDHHSAPYSITEDFVTVYRMHPLVPDDYEFLNIAGKAEPQQLSFDSIHGGANSRGVLKSIGISNCIYSLGVANPGAVTLHNSPNFMRRFDRTDGHVIDMISTDIIRSRERGVPRYNDFRRQLRLKPATSFDEISGGDRDTAVKMSKIYGGDIEKVDAMVGMFGEKLPEKFGFSDTAFRIFVLMATRRLKSDRFFTVDFTPRVYTPEGLAWIADNDMCSVLIRHYPELEPVLRDQRNAFAPWSRLGQGQR

SEQ ID NO: 246 - protein, 597 aa, Mycolicibacterium setense
MPSLLTRWFIKATEVADRRIGWDKFPPWIGLGVLIGVRDALREHNLYDAYRGKPPAPPEHTPAEYLTIRTVDGSYNDLSAPSMGMANTRFGRNVPLDKGHAEQAPNLMDPNPRVISNELLRRDTFKPATTLNVLAAAWLQFETRDWFSHDTDPSKMIEIPVPDGDDWDESAIRIPSTPPDPHPTPGDSTFINTETHWWDASQLYGSNQLFQDAIRTKDKKDGKVRIDADGFIDLDPSLLGASGGADGWWLGLELMGTIFLREHNAICDRLQAAYPTWTGDQIFHKARMINAALIAKIHTVEWTPAILGHPTLQIGMRANWFGLAGERVKQLFGRLSADEAISGVVGSATDHHSAPYSITEDFVTVYRMHPLVPDDYEFLNIAGKAEPQQLSFDSIHGGANSRGVLKSIGISNCIYSLGVANPGAVTLHNSPNFMRRFDRTDGHVIDMISTDIIRSRERGVPRYNDFRRQLRLKPATSFDEISGGDRDTAVKMSKIYGGDIEKVDAMVGMFGEKLPEKFGFSDTAFRIFVLMATRRLKSDRFFTVDFTPRVYTPEGLAWIADNDMCSVLIRHYPELEPVLRDQRNAFAPWSRLGQGQR

SEQ ID NO: 247 - protein, 592 aa, Mycolicibacterium fortuitum
MPKPSLLMRLFLTTTELIDRRIGWDKLPPVLGVAVLVGIRDALREHNLYDTCQGAPPEADPLPPSDYLTVRTANGSYNDLSAPSMGMANTRFGRNVPLTEGRSEQLPELMDPNPRLISTKLLQRRAFRPATTLNVLAAAWLQFETRDWFSHGSDPNRMLEIPRPPEDDWPEDTIKVPATAVDPTAEPGGSTFLNTETHWWDGSQIYGSNQQFQDAIRTHHDGKVCIDADGFIDIPPTLIGAAGGADGWWLGMELMGTIFMREHNAICDRLKAAYPNWNDDQLFNKARLINAALIAKIHTIEWTPAILGHPTLQIGMRANWFGLAGERVKELFGRLSAGDLLSGIPGSNTDHHTAPYSITEDFVTVYRMHPLVPDDYEFLSLTSGIEPRALTFRDIHGGANSRGVLKSQGVAECLYSLGVAHPGAVTLHNSPTFMRDFERVDEHALDMIATDILRSRERGVPRYNDFRRALRLAPATSFDEISGGDAATAAVMAEIYGGDIEKVDTMVGMFGEKLPEGFGFSDTAFRIFVLMASRRLKSDRFYTVDFTPRVYTPEGMDWIDRNDMVSVLLRHYPELEPALRGQRNAFAPWTRL

SEQ ID NO: 248 - DNA, 1890 bp, Artificial Sequence
  Codon optimized synthetic gene sequence
catatgcaccaccaccaccaccacatgggatcagggctatttaaacccagggttcacccggacctgcgtgatgtgtttagcaagatgagcttctttgacaaaattggtttcctgtttatccacgcgttcgataagcgtaacctgtggcacaaagtgccggttccgatcggcctgctgtacctgaacacccgtcgtaccctgctggagaaatataacctgctggcggttggtcgtagcagccatggtgcgctgtttgacccgaaggagtttctgtaccgtaccgaagacggtaaatataacgatccgcacaacgcggaagcgggtagccagaacaccttctttggccgtaacatggagccggtggaccagcaagatgaactgatgagcccggacccgtttgtggttgcgaccaagctgctggcgcgtcgtgagtataaggataccggtaaacagttcaacattctggcggcggcgtggatccaatttatggttcacgactggatggatcacatggaagacaccggtcaaatcggcattaccgcgccgaaagaggtggcgaacgaatgcccgctgaagagcttcaaatttcacccgaccaaggagctgccgaccaacagcgacggtatcaaaattggccactacaacattcgtaccgcgtggtgggatggtagcgcggtttatggcaacaacgaggaacgtgcggagaagctgcgtacctacgttgacggtaaactggtgatcggtgacgatggcctgctgctgcacaaggaaaacggtgttgcgctgagcggcgatattcgtaacagctgggcgggcgtgagcatcctgcaggcgctgttcgttaaggagcacaacgcggtgtgcgacgcgatcaaagaggaacacccgaacctgagcgatgaggaactgtaccgttatgcgaagctggtgaccagcgcggttattgcgaaagtgcacaccatcgactggaccgttgaactgctgaagaccaaaaccatgcgtgcggcgatgcgtgcgaactggtacggtctgctgggcaagaaaattaaagataccttcggtcacattggtggcccgatcctgggtggcctggttggtctgaagaaaccgaacaaccacggcgtgccgtacagcctgaccgaggaatttaccagcgtgtatcgtatgcacagcctgatcccgagcaccctgaagctgcgtgacccgaccggtcagccggatgcgaacaacagcccgccgtgcctggaggacatcgatattggtgaaatgattggtctgaaaggcgaggaacaactgagcaagatcggcttcgagaaacaggcgctgagcatgggttaccaagcgtgcggcgcgctggaactgtggaactatccgagcttctttcgtaacctgattccgcagaacctggacggtaccaaccgtagcgaccgtatcgatctggcggcgctggaagtgtaccgtgatcgtgaacgtagcgtgccgcgttataacgagttccgtcgtcgtctgttcctgatcccgattaagagctgggaggacctgaccagcgacaaagatgcgatcgaaaccattcgtgcgatctatggtgacgatgttgaaaagctggacctgctggttggtctgatggcggagaagaaaattaaaggcttcgcgatcagcgaaaccgcgttcaacatctttattctgatggcgagccgtcgtctggaagcggaccgtttctttaccagcaactttaacgaggaaacctacaccaagaaaggtatgcaatgggttaagaccaccgagggcctgcgtgatgtgattaaccgtcactatccggaaatcaccgcgaagtggatgaaaagcagcagcgcgttcagcgtgtgggatgcggattactaatgaaagctt

SEQ ID NO: 249 - protein, 625 aa, Oryza sativa
MHHHHHHMGSGLFKPRVHPDLRDVFSKMSFFDKIGFLFIHAFDKRNLWHKVPVPIGLLYLNTRRTLLEKYNLLAVGRSSHGALFDPKEFLYRTEDGKYNDPHNAEAGSQNTFFGRNMEPVDQQDELMSPDPFVVATKLLARREYKDTGKQFNILAAAWIQFMVHDWMDHMEDTGQIGITAPKEVANECPLKSFKFHPTKELPTNSDGIKIGHYNIRTAWWDGSAVYGNNEERAEKLRTYVDGKLVIGDDGLLLHKENGVALSGDIRNSWAGVSILQALFVKEHNAVCDAIKEEHPNLSDEELYRYAKLVTSAVIAKVHTIDWTVELLKTKTMRAAMRANWYGLLGKKIKDTFGHIGGPILGGLVGLKKPNNHGVPYSLTEEFTSVYRMHSLIPSTLKLRDPTGQPDANNSPPCLEDIDIGEMIGLKGEEQLSKIGFEKQALSMGYQACGALELWNYPSFFRNLIPQNLDGTNRSDRIDLAALEVYRDRERSVPRYNEFRRRLFLIPIKSWEDLTSDKDAIETIRAIYGDDVEKLDLLVGLMAEKKIKGFAISETAFNIFILMASRRLEADRFFTSNFNEETYTKKGMQWVKTTEGLRDVINRHYPEITAKWMKSSSAFSVWDADY

SEQ ID NO: 250 - DNA, 1807 bp, Artificial Sequence
  Codon optimized synthetic gene sequence
catatgcaccaccaccaccaccacccgaagccgagcctgctgatgcgtctgttcctgaccaccaccgaactgattgaccgtcgtatcggttgggataaactgccgccggttctgggtgtggcggttctggtgggcattcgtgacgcgctgcgtgaacacaacctgtatgatacctgccagggtgctccgccggaggcggacccgctgccgccgagcgattacctgaccgttcgtaccgcgaacggcagctataacgatctgagcgcgccgagcatgggtatggcgaacacccgttttggtcgtaacgtgccgctgaccgagggtcgtagcgaacaactgccggagctgatggacccgaacccgcgtctgatcagcaccaaactgctgcaacgtcgtgcgtttcgtccggcgaccaccctgaacgttctggcggcggcgtggctgcaatttgagacccgtgactggtttagccacggcagcgatccgaaccgtatgctggaaattccgcgtccgccggatgatgactggccggaggacaccatcaaagttccggcgaccgcggttgatccgaccgcggaaccgggtggcagcaccttcctgaacaccgagacccactggtgggatggtagccagatttatggcagcaaccagcaattccaagacgcgattcgtacccaccacgatggtaaagtgtgcatcgatgcggacggctttatcgatattccgccgaccctgattggtgcggcgggtggcgcggacggttggtggctgggcatggaactgatgggcaccattttcatgcgtgagcacaacgcgatctgcgaccgtctgaaggcggcgtacccgaactggaacgatgaccagctgtttaacaaggcgcgtctgatcaacgcggcgctgatcgcgaaaattcacaccatcgaatggaccccggcgattctgggtcacccgaccctgcaaatcggcatgcgtgcgaactggttcggtctggcgggcgaacgtgttaaagagctgtttggtcgtctgagcgcgggtgacctgctgagcggtattccgggcagcaacaccgatcaccacaccgcgccgtacagcatcaccgaagacttcgttaccgtgtatcgtatgcacccgctggtgccggatgactacgaactgctgagcctgaccagcggtattgagccgcgtgcgctgacctttagcgacatccacggtggcgcgaacagccgtggtgttctgaagagccagggcgtggcggagtgcctgtatagcctgggtgttgcgcacccgggtgcggtgaccctgcacaacagcccgaccttcatgcgtgactttgaacgtgttgatgagcacgcgctggacatgattgcgaccgatatcctgcgtagccgtgaacgtggtgtgccgcgttataacgattttcgtcgtgcgctgcgtctggcgccggcgaccagctttgacgagattagcggtggcgatgcggcgaccgcggcggttatggcggaaatttacggtggcgacatcgagaaggttgataccatggtgggcatgttcggcgaaaaactgccggagggtttcggctttagcgacaccgcgttccgtatttttgtgctgatggcgagccgtcgtctgaagagcgaccgtttctacaccgttgattttaccccgcgtgtgtataccccggagggtatggattggatcgaccgtaacgatatggttagcgtgctgctgcgtcactatccggagctggaaccggcgctgcgtggtcaacgtaacgcgtttgcgccgtggcgtcgtctgtaataagctt

SEQ ID NO: 251 - protein, 611 aa, Phaeosphaeria nodorum
MHHHHHHSTPSKSEPYNYTPSLPQRALVFVYKGINKIIPWHKLPTYIGVLNLSAYRYELRSKNLHDVYPSREDQGTRGCPAITDEQFLHTRHSDGLFNDLEASKMGCVGMRFGRNVAREHTARPSHEELMTPNPRLISEQLLKRDKFKPATSLNLLAAAWIQLVQQHRVPLPAGDAWNSPDGKMKIDATQDDEPLDQTDNTSPAYKNINTHWWDGSQIYGSSEAHTTGLRLGATNGKLLVDEQKFATFLPRDANCIPQTGFNTNWWLGLEILHTLFVLEHNAICDALHISYPDWTSEKLFDTARLVNCALMAKIHTTEWTPAILAHPALEISMNANWWGILGERLYKLLGRVSKTSEALSGIPGSTVEHHAAPYSLTEEFVSVYRMHSLIPDSIAFFSASNGAHKQTYPIQSVAFEHTRTPFEKSNLSFADIFYSFGINYPGAITLNNMPHFLKDLHTPDGRHIDLGTIDILRDRERGVPRYNQFRRLFHMPAQPSFLAITGGNKVVADKLAKLYNDDIETVDLLIGCLAEPLPKGFGFSDTAFRVFILMASRRLKSDRFIAGDWNTETYSEVGMKWVQGNVMKDVLGRHFPELKGVLGGSGNGKYTSYFE

SEQ ID NO: 252 - DNA, 1926 bp, Artificial Sequence
  Codon optimized synthetic gene sequence
aagcttggatccggctcttctggtagtggagaaaatctatattttcaaggagattttcacgaaatatacgctagaatgagcctgctggatcgttttctgctgctgatcgtgcacggtgttgacaagatggtgccgtggcacaaactgccggttttcctgggcctgacctacctggaagtgcgtcgtcacctgcaccagcaatataacctgctgaacgttggtcagaccccgaccggcatccgttttgacccggcgaactacccgtatcgtaccgcggatggcaagttcaacgacccgtttaacgagggtgtgggcagccagaacagcttctttggccgtaactgcccgccggttgatcaaaagagcaaactgcgtcgtccggacccgatggtggttgcgaccaagctgctgggtcgtaagaaattcattgataccggcaaacagtttaacatgatcgcggcgagctggatccaattcatgattcacgattggatcgaccacctggaggacacccaccagatcgaactggtggcgccgaaagaggtggcgagcaaatgcccgctgagcagcttccgttttctgaagaccaaagaagtgccgaccggtttctttgagattaaaaccggcagccaaaacatccgtaccccgtggtgggatagcagcgtgatttacggtagcaacagcaagaccctggatcgtgttcgtacctataaagacggcaagctgaaaatcagcgaggaaaccggcctgctgctgcacgatgaagacggtctggcgattagcggtgacattcgtaacagctgggcgggcgtgagcgcgctgcaggcgctgttcattaaggaacacaacgcggtttgcgatgcgctgaaagacgaggacgatgacctggaggatgaagacctgtaccgttatgcgcgtctggtgaccagcgcggtggttgcgaagatccacaccattgattggaccgttcagctgctgaaaaccgacaccctgctggcgggtatgcgtgcgaactggtacggtctgctgggcaagaaattcaaggatagctttggtcatgcgggtagcagcatcctgggtggcgtggttggtatgaagaaaccgcaaaaccacggcgtgccgtacagcctgaccgaagacttcaccagcgtttatcgtatgcacagcctgctgccggatcagctgcacatcctggacattgatgacgtgccgggtaccaacaaaagcctgccgctgatccaagagattagcatgcgtgacctgattggtcgtaagggcgaggaaaccatgagccacatcggctttaccaaactgatggttagcatgggtcaccaggcgagcggtgcgctggaactgatgaactatccgatgtggctgcgtgatattgttccgcatgacccgaacggtcaagcgcgtccggatcatgttgacctggcggcgctggaaatctaccgtgatcgtgagcgtagcgtgccgcgttataacgaattccgtcgtagcatgtttatgatcccgattaccaagtgggaggatctgaccgaagacgaggaagcgatcgaggtgctggatgacgtttacgatggtgacgtggaggaactggacctgctggttggtctgatggcggaaaagaaaattaaaggcttcgcgatcagcgagaccgcgttctatatctttctgattatggcgacccgtcgtctggaagcggatcgtttctttaccagcgactttaacgagaccatttacaccaagaaaggcctggaatgggtgaacaccaccgagagcctgaaggatgttatcgaccgtcactatccggatatgaccgacaaatggatgaacagcgagagcgcgttcagcgtttgggacagcccgccgctgaccaagaacccgattccgctgtacctgcgtatcccgagctaatgactcgag

SEQ ID NO: 253 - protein, 1025 aa, Arabidopsis thaliana
MGSSHHHHHHGTKTEEGKLVIWINGDKGYNGLAEVGKKFEKDTGIKVTVEHPDKLEEKFPQVAATGDGPDIIFWAHDRFGGYAQSGLLAEITPDKAFQDKLYPFTWDAVRYNGKLIAYPIAVEALSLIYNKDLLPNPPKTWEEIPALDKELKAKGKSALMFNLQEPYFTWPLIAADGGYAFKYENGKYDIKDVGVDNAGAKAGLTFLVDLIKNKHMNADTDYSIAEAAFNKGETAMTINGPWAWSNIDTSKVNYGVTVLPTFKGQPSKPFVGVLSAGINAASPNKELAKEFLENYLLTDEGLEAVNKDKPLGAVALKSYEEELAKDPRIAATMENAQKGEIMPNIPQMSAFWYAVRTAVINAASGRQTVDEALKDAQTGTDYDIPTTKLGSGSSGSGENLYFQGDFHEIYARMSLLDRFLLLIVHGVDKMVPWHKLPVFLGLTYLEVRRHLHQQYNLLNVGQTPTGIRFDPANYPYRTADGKFNDPFNEGVGSQNSFFGRNCPPVDQKSKLRRPDPMVVATKLLGRKKFIDTGKQFNMIAASWIQFMIHDWIDHLEDTHQIELVAPKEVASKCPLSSFRFLKTKEVPTGFFEIKTGSQNIRTPWWDSSVIYGSNSKTLDRVRTYKDGKLKISEETGLLLHDEDGLAISGDIRNSWAGVSALQALFIKEHNAVCDALKDEDDDLEDEDLYRYARLVTSAVVAKIHTIDWTVQLLKTDTLLAGMRANWYGLLGKKFKDSFGHAGSSILGGVVGMKKPQNHGVPYSLTEDFTSVYRMHSLLPDQLHILDIDDVPGTNKSLPLIQEISMRDLIGRKGEETMSHIGFTKLMVSMGHQASGALELMNYPMWLRDIVPHDPNGQARPDHVDLAALEIYRDRERSVPRYNEFRRSMFMIPITKWEDLTEDEEAIEVLDDVYDGDVEELDLLVGLMAEKKIKGFAISETAFYIFLIMATRRLEADRFFTSDFNETIYTKKGLEWVNTTESLKDVIDRHYPDMTDKWMNSESAFSVWDSPPLTKNPIPLYLRIPS

SEQ ID NO: 254 - DNA, 1960 bp, Artificial Sequence
  Codon optimized synthetic gene sequence
catatgcaccaccaccaccaccactggagcatcgtgaccgacccgattaaggatctgatcagcaaggtggttaaaaacagcattcacccggacttccacgatgcggttagcaagatgaccatcattgacgcgtttctgttctttattgtgcacagcatcgataaactgggtatctggcaccgtctgccggttttctttggcctgctgtacctggcgattcgtcgtcacctgcaccaggaatataacctgctgaacgttggtaccaccccggtgggtatccgtagcaacccgagcgacttcccgtaccgtaccgcggatggtcgttataacgacccgtttaacgatggtgcgggcagccagggtagcttctttggccgtaacattctgccggtggaccaaaagaacaaactgctgaagccggatccgatggtggttgtgaccaaactgctggagcgtaagacctacaaagacaccggcacccagttcaacgttatcgcggcgagctggattcaatttatgatccacgactggattgatcacatggaggataccaagcaggttgagctgagcgcgccgagcgaggtggcgagccaatgcccgctgaagagcttcaaattctttaagaccaaagaaatcccgaccggtttttacgacattaaaaccggccacgcgaacgttcgtaccccgtggtgggatggtagcgttgtgtatggcagcaacgagcaggttctgaacaaagtgcgtaccttcaaagacggcaagctgaaaatcagcaaagaaggccacctgctgcacaacgaggacggtaccgcgatcagcggcgatattcgtaacagctgggcgggtgtgaccaccctgcagaccctgttcgttcaagaacacaacgcggtgtgcgacgcgctgaagaaagagaacagcgatctggaggacgaagatctgtaccgtcacgcgcgtctggttaccagcgcggtgatcgcgaagattcacaccatcgactggaccgttgaactgctgaaaaccgataccctgctggcgggtatgcgtgcgaactggtatggtctgctgggcaagcaattcaaagaccgttttggtcacgttggcaacagcatcctgagcggtttcgtgggcatgaagcgtagcgagaaccacggcgttccgtacagcctgaccgaggaatttgcgaccgtgtatcgtatgcacccgctgctgccggacagcctgcacctgcgtgatattagcgcgagcccgggtccgaacaagagcccgccgctgattaaagaaatcccgatgaacgacctgatcggtctgcagggcgagaaaaccctgctggaaattggcaacgcgaagaaactggttagcatgggtcaccaagcgtgcggtgcgctggaactgtggaactacccgagctggctgcgtaacctggttccgcacaacatcgacggtaccgagcgtagcgaccacgttgatctggcggcgctggaagtgtaccgtgatcgtgagcgtaacgtggcgcgttataaccaattccgtcgtggtctgctgctgatcccgattagcaagtgggaggacctgaccgacgatgaggaagcgatcaaagttctggaggaagtgtatggcgacgatgtggaggaactggatgttctggtgggtctgatggcggaaaagaaaatcaagggcttcgcgattagcgagaccgcgttcgttatttttctgctgatggcgagccgtcgtctggaagcggaccgtttctttaccagcaactttaacgaggaaacctacaccaagaaaggtctggaatgggttaacaccaccgagagcctgaaggacgtgatcgatcgtcaccacccggagatgacccacaaatggctgaacagcagcagcgcgttcagcgtgtgggataccagcccgaacaaacacaaccacatcccgatttattttcgtgttccgaactaataagctt

SEQ ID NO: 255 - protein, 649 aa, Pisum sativum
MHHHHHHWSIVTDPIKDLISKVVKNSIHPDFHDAVSKMTIIDAFLFFIVHSIDKLGIWHRLPVFFGLLYLAIRRHLHQEYNLLNVGTTPVGIRSNPSDFPYRTADGRYNDPFNDGAGSQGSFFGRNILPVDQKNKLLKPDPMVVVTKLLERKTYKDTGTQFNVIAASWIQFMIHDWIDHMEDTKQVELSAPSEVASQCPLKSFKFFKTKEIPTGFYDIKTGHANVRTPWWDGSVVYGSNEQVLNKVRTFKDGKLKISKEGHLLHNEDGTAISGDIRNSWAGVTTLQTLFVQEHNAVCDALKKENSDLEDEDLYRHARLVTSAVIAKIHTIDWTVELLKTDTLLAGMRANWYGLLGKQFKDRFGHVGNSILSGFVGMKRSENHGVPYSLTEEFATVYRMHPLLPDSLHLRDISASPGPNKSPPLIKEIPMNDLIGLQGEKTLLEIGNAKKLVSMGHQACGALELWNYPSWLRNLVPHNIDGTERSDHVDLAALEVYRDRERNVARYNQFRRGLLLIPISKWEDLTDDEEAIKVLEEVYGDDVEELDVLVGLMAEKKIKGFAISETAFVIFLLMASRRLEADRFFTSNFNEETYTKKGLEWVNTTESLKDVIDRHHPEMTHKWLNSSSAFSVWDTSPNKHNHIPIYFRVPN

SEQ ID NO: 256 - DNA, 1954 bp, Artificial Sequence
  Codon optimized synthetic gene sequence
catatgcatcaccaccaccaccacgcgttcatcaccaaggcgctgtttaacaacatcctgcgtcgtttcattcaccaggattttcacgaggctgtgagcagcatgaccatcattgatgcgttcctgtttctgatggtgcacagcgttgaccgtctgggtatctggcaccgtctgccggtggttctgggcctgatttacctggcggttcgtcgtcacctgcaccagcaatataacctgatcaacgtgggtgaaaccccgagcggcgttcgtttcagcccgggtgactacccgtatcgtaccgcggatggcagctacaacgacccgtttaacgagggtgcgggcagccagggtagcttctttggccgtaacattatgccggtgcaccaaaccgataagctgatgaaaccggacccgatggtggttgcgaccaaactgctgacccgtacccagtataaggacaccgataaacaattcaacatgatcgcggcgagctggattcagtttatgatccacgactggattgatcacatggagaacaccaaccagcaagtggagttcattgcgccgaaggaagttgcgaacaaatgcccgctgagcagcttcaagttttacccgaccaaagaattcccgaccggtttttataacatcaagagcggcgcgaaaaacattcgtaccccgtggtgggatggtagcgtgatctacggcagcaacaaggagcgtctgcagaaagttcgtaccttcaccgatggcaagctgaaaattagcgaggacggcctgctgcagcaagacgaagatggtatcccgattagcggcgatatccgtaacagctgggcgggtattagcaccctgcaagcgctgtttatcaaggagcacaacgcggtgtgcgacaccctgaagaaagaatacccggacctgaacgatgaggaactgtaccgttatgcgcgtctggtgaccagcgcggttatcgcgaagattcacaccatcgattggaccgttgaactgctgaaaaccgacatgctgctggcgggtatgcgtgcgaactggtatggtctgctgggcaagaaattcaaggacacctttggtcatgtgggtggcagcagcctgggtggcctggttggtctgcgtaaaccggtgaaccacggcgttccgtacagcctgaccgaggaattcaccagcgtgtatcgtctgcaccagctgctgccggatagcatccacctgcgtaacattaacgtggcgccgggtccgaacaagagcccgccgctgctggaggaagttccgatgccggacctgatcggtcacaagggcgagaaaaccctgagccagattggcttcacccgtcaatttgttagcatgggtcatcaggcgtgcggtgcgctggaactgtggaactacccgagctggctgcgtgatctggtggcgcaagacgttgatggtaaagatcgtccggatcatgtggacctggcggcgctggagatctaccgtgaccgtgagcgtaaggttgcgcgttataaccaattccgtcgtgcgctgctgctgatcccgattagcaaatgggaggatctgaccgaagacaagaacgcgattgaagtgctgaaagatgtttatggcgacgatgtggaggaactggacctgatggttggtctgatggcggagaagaaaatcaagggctttgcgattagcgaaaccgcgttcatcgtgtttctgctgatggcgacccgtcgtctggaggcggatcgtttctttaccagcgacttcaacgaggaaacctacaccaagaaaggttttgagtgggtgaacaccaccgaaagcctgaaagatgttctggaccgtcactatccggaaatcagcaagaaatggatgaacagcaccagcgcgtttagcgtttgggacagcccgccgaacgcgccgaacccgattccgctgtacctgcgttttccgagcagctaataagctt

SEQ ID NO: 257 - protein, 647 aa, Gossypium raimondii
MHHHHHHAFITKALFNNILRRFIHQDFHEAVSSMTIIDAFLFLMVHSVDRLGIWHRLPVVLGLIYLAVRRHLHQQYNLINVGETPSGVRFSPGDYPYRTADGSYNDPFNEGAGSQGSFFGRNIMPVHQTDKLMKPDPMVVATKLLTRTQYKDTDKQFNMIAASWIQFMIHDWIDHMENTNQQVEFIAPKEVANKCPLSSFKFYPTKEFPTGFYNIKSGAKNIRTPWWDGSVIYGSNKERLQKVRTFTDGKLKISEDGLLQQDEDGIPISGDIRNSWAGISTLQALFIKEHNAVCDTLKKEYPDLNDEELYRYARLVTSAVIAKIHTIDWTVELLKTDMLLAGMRANWYGLLGKKFKDTFGHVGGSSLGGLVGLRKPVNHGVPYSLTEEFTSVYRLHQLLPDSIHLRNINVAPGPNKSPPLLEEVPMPDLIGHKGEKTLSQIGFTRQFVSMGHQACGALELWNYPSWLRDLVAQDVDGKDRPDHVDLAALEIYRDRERKVARYNQFRRALLLIPISKWEDLTEDKNAIEVLKDVYGDDVEELDLMVGLMAEKKIKGFAISETAFIVFLLMATRRLEADRFFTSDFNEETYTKKGFEWVNTTESLKDVLDRHYPEISKKWMNSTSAFSVWDSPPNAPNPIPLYLRFPSS

SEQ ID NO: 258 - DNA, 1960 bp, Artificial Sequence
  Codon optimized synthetic gene sequence
catatgcaccaccaccaccaccacagcctggttatggatagcctgaagaacctgctgctgagcccgctgcgtggtttcattcacaaagacctgcacgatatctttgagcgtatgaccctgctgagcaagctgctgttcctgatcgtgcacctggttgacaaactgaacctgtggcatcgtctgccggttctgctgggtctgctgtatctgggtgcgcgtcgtcacctgcaccaggaatataacctgattaacgttggcaagaccccgattggtgttcgtagcaacccggcggaccacccgtaccgtaccgcggatggtaaatataacgacccgttcaacgagggtgcgggcagcgagctgagcttctttggccgtaacatgctgccggttgatcagcacaaccaactgaagaaaccggacccgatggtggttgcgaccaagctgctggcgcgtcgtaacttcgtggataccggtaaacagtttaacatgattgcggcgagctggatccaatttatgattcacgactggatcgatcacctggaagacaccaagcagatcgagctgaaagcggcggaggaagttgcgagccaatgcccgctgaagagcttccgtttctttaagaccaaagaaattccgaccggtttttacgagatcaaaaccggccacctgaacacccgtaccccgtggtgggatggtagcgcgatttatggcagcaacgcggaagtgctgaagaaagttcgtaccttcaaggacggcaagctgaaactgagcgcggatggcctgctggaaatcgacaagaacggtaaaatcattagcggtgatgttcgtaacacctgggcgggtctgagcgcgctgcaggcgctgtttgttcaagagcacaacagcgtgtgcgatgcgctgaagaaagaatacccggagctggaggaagaggacctgtatcgtcacgcgcgtctggtgaccagcgcggttattgcgaaggtgcacaccatcgattggaccgtggaactgctgaaaaccgacaccctgctggcgggtatgcgtgcgaactggtacggtctgctgggcaagaaattcaaagatacctttggccacgttggtggcagcattctgggtggcttcgtgggtatgaagaaaccggagaactacggcgttccgtatagcctgaccgaagagtttaccagcgtgtatcgtatgcaccagctgctgccggataagctgcaactgcgtaacatcgacgcgaccccgggtccgaacaaaagcctgccgctgaccaacgaaattccgctggaggacctgatcggtggcaagggcgagaaaaacctgagcaagattggcttcaccaaacagatggttagcatgggtcaccaagcgtgcggtgcgctggaactgtggaactacccggtttggatgcgtgatctgatcccgcaggacgtggatggtaccgaccgtccggatcacattgacctggcggcgctggaaatctaccgtgaccgtgagcgtagcgtggcgcgttataacgaattccgtcgtggcatgctgcaaatcccgattagcaagtgggaggatctgaccgacgatgaagaggttattaacaccctgggtgaagtttacggcgacgatgtggaagagctggacctgatggtgggtatggcggcggaaaagaaaattaaaggcttcgcgatcagcgagaccgcgttctttatctttctggtgatggcgagccgtcgtctggaagcggatcgtttctttaccagcaactacaacgaagagacctataccaagaaaggtctggaatgggttaacaccaccgagagcctgaaggatgtgctggaccgtcactacccggaaattaccgagaaatggatgaacagcagcagcgcgttcagcgtttgggacagcaccccgcagccgcacaacccgatcccgctgtattttcgtgtgccgccgcaataataagctt

SEQ ID NO: 259 - protein, 649 aa, Nicotiana tabacum
MHHHHHHSLVMDSLKNLLLSPLRGFIHKDLHDIFERMTLLSKLLFLIVHLVDKLNLWHRLPVLLGLLYLGARRHLHQEYNLINVGKTPIGVRSNPADHPYRTADGKYNDPFNEGAGSELSFFGRNMLPVDQHNQLKKPDPMVVATKLLARRNFVDTGKQFNMIAASWIQFMIHDWIDHLEDTKQIELKAAEEVASQCPLKSFRFFKTKEIPTGFYEIKTGHLNTRTPWWDGSAIYGSNAEVLKKVRTFKDGKLKLSADGLLEIDKNGKIISGDVRNTWAGLSALQALFVQEHNSVCDALKKEYPELEEEDLYRHARLVTSAVIAKVHTIDWTVELLKTDTLLAGMRANWYGLLGKKFKDTFGHVGGSILGGFVGMKKPENYGVPYSLTEEFTSVYRMHQLLPDKLQLRNIDATPGPNKSLPLTNEIPLEDLIGGKGEKNLSKIGFTKQMVSMGHQACGALELWNYPVWMRDLIPQDVDGTDRPDHIDLAALEIYRDRERSVARYNEFRRGMLQIPISKWEDLTDDEEVINTLGEVYGDDVEELDLMVGMAAEKKIKGFAISETAFFIFLVMASRRLEADRFFTSNYNEETYTKKGLEWVNTTESLKDVLDRHYPEITEKWMNSSSAFSVWDSTPQPHNPIPLYFRVPPQ

SEQ ID NO: 260 - DNA, 1846 bp, Artificial Sequence
  Codon optimized synthetic gene sequence
catatgcaccaccaccaccaccacagcaccccgagcaagagcgagccgtacaactataccccgagcctgccgcagcgtgcgctggtgttcgtttacaagggcattaacaaaatcattccgtggcacaagctgccgacctatatcggtgttctgaacctgagcgcgtaccgttatgaactgcgtagcaaaaacctgcacgacgtgtacccgagccgtgaagatcaaggtacccgtggctgcccggcgatcaccgatgaacaatttctgcacacccgtcacagcgacggcctgttcaacgatctggaggcgagcaagatgggttgcgttggcatgcgttttggtcgtaacgtggcgcgtgaacacaccgcgcgtccgagccacgaggaactgatgaccccgaacccgcgtctgattagcgagcagctgctgaaacgtgacaagttcaaaccggcgaccagcctgaacctgctggcggcggcgtggatccaactggttcagcaacatcgtgtgccgctgccggcgggtgatgcgtggaacagcccggacggcaagatgaaaatcgatgcgacccaggacgatgaaccgctggaccaaaccgataacaccagcccggcgtacaaaaacattaacacccactggtgggacggcagccaaatctatggtagcagcgaagcgcacaccaccggtctgcgtctgggtgcgaccaacggcaagctgctggttgatgaacagaaattcgcgacctttctgccgcgtgacgcgaactgcattccgcaaaccggctttaacaccaactggtggctgggtctggagatcctgcacaccctgttcgttctggaacacaacgcgatctgcgacgcgctgcacattagctacccggattggaccagcgagaagctgtttgacaccgcgcgtctggtgaactgcgcgctgatggcgaaaattcacaccaccgagtggaccccggcgattctggcgcacccggcgctggaaatcagcatgaacgcgaactggtggggtattctgggcgaacgtctgtataagctgctgggtcgtgttagcaaaaccagcgaggcgctgagcggtattccgggtagcaccgtggaacatcatgcggcgccgtacagcctgaccgaggaattcgtgagcgtttatcgtatgcacagcctgatcccggatagcattgcgttctttagcgcgagcaacggtgcgcacaagcagacctacccgatccaaagcgttgcgttcgagcacacccgtaccccgtttgagaagagcaacctgagcttcgcggacatcttctacagctttggcattaactatccgggtgcgatcaccctgaacaacatgccgcactttctgaaggacctgcacaccccggatggccgtcacattgacctgggtaccatcgacattctgcgtgatcgtgagcgtggtgtgccgcgttacaaccagttccgtcgtctgtttcacatgccggcgcaaccgagcttcctggcgatcaccggtggcaacaaagtggttgcggataagctggcgaaactgtataacgacgatattgagaccgttgacctgctgattggttgcctggcggaaccgctgccgaagggtttcggctttagcgataccgcgttccgtgtgtttattctgatggcgagccgtcgtctgaaaagcgaccgtttcatcgcgggtgattggaacaccgagacctatagcgaagttggcatgaagtgggtgcagggtaacgttatgaaagacgtgctgggccgtcactttccggagctgaagggtgtgctgggtggcagcggtaacggcaaatacaccagctatttcgaataataagctt

SEQ ID NO: 261 - protein, 599 aa, Mycolicibacterium fortuitum
MHHHHHHMPKPSLLMRLFLTTTELIDRRIGWDKLPPVLGVAVLVGIRDALREHNLYDTCQGAPPEADPLPPSDYLTVRTANGSYNDLSAPSMGMANTRFGRNVPLTEGRSEQLPELMDPNPRLISTKLLQRRAFRPATTLNVLAAAWLQFETRDWFSHGSDPNRMLEIPRPPDDDWPEDTIKVPATAVDPTAEPGGSTFLNTETHWWDGSQIYGSNQQFQDAIRTHHDGKVCIDADGFIDIPPTLIGAAGGADGWWLGMELMGTIFMREHNAICDRLKAAYPNWNDDQLFNKARLINAALIAKIHTIEWTPAILGHPTLQIGMRANWFGLAGERVKELFGRLSAGDLLSGIPGSNTDHHTAPYSITEDFVTVYRMHPLVPDDYELLSLTSGIEPRALTFSDIHGGANSRGVLKSQGVAECLYSLGVAHPGAVTLHNSPTFMRDFERVDEHALDMIATDILRSRERGVPRYNDFRRALRLAPATSFDEISGGDAATAAVMAEIYGGDIEKVDTMVGMFGEKLPEGFGFSDTAFRIFVLMASRRLKSDRFYTVDFTPRVYTPEGMDWIDRNDMVSVLLRHYPELEPALRGQRNAFAPWRRL

SEQ ID NO: 262 - DNA, 1927 bp, Artificial Sequence
  Codon optimized synthetic gene sequence
catatgcatcaccaccaccaccacgcgttcagcattagcctgccggactttgtgcacccgcagctgcgtcacgtggttgcgaaaatgagcttctttgataccatcctgttctacgtggttcacctggtggacaagtttgatctgtggcatcgtctgccggttctgctgggtgcggcgtacctgggtatccgtcgtcacctgcaccagcgttataacctgctgcacgtgggtaaagttaacggcaagaaatacgacaccgaggaattcacctatcgtaccgcggatggtagctgcaaccacccggtggatcacctggttggtagccaaggcaccttctttggtcgtaacatgctgccgagcaccagcagctacgcgctgctggagccgcacccggtgaccgttgcgagcaagctgctggaacgtcgtaaatataccgactgcggtggccagttcaacatgattgcgtgcgcgtggctgcaatttatgatccacgactggaacgatcacatggaggacaccgaacaggtggaactgcgtgcgccgcaagatgttgcggcgggttgcccgctgaagagcttcaaatttctgaagaccaagaaactgccgaccggcagcccggacctgaaattcggtcacctgaacagccgtaccccgtggtgggatggtagcgtgatttacggcaacaacgaggaaggtatgatccgtgttcgtcgttttaaagacggcaagctgcgtctgagcggtgatggcctgctggagcacgacgataagggcatcccgattagcggtgacgtgcgtaactactgggcgggttatagcctgctgcaggcgctgttcgttaaggaacacaacgcgatttgcgatatgctgaaagaacactacccggagtttgacgatgaaaaggtgtatcgtcacgcgcgtctgatcaccagcgcggttatcgcgaaaattcacaccatcgactggaccctggagattgtgaagaccgataccctgatggcgggcatgcgtatcaactggtacggtctgctgggcaaacgtgttaaggacctgctgggtccgaagtttggtccggtgctgagcggtctggttggcctgaagaaaccgcgtgatcacggtaccccgtacagcctgaccgaggaatttgtgagcgtttatcgtatgcacagcctgctgccggacaccattgtgctgcgtgatctgaagagcaccaccagcgaggacaaaagcctgccgattcaagatgagatcccgatgcgtgaaatgattggtaaagagggcgaaaagaacctgagcaaaatcggcatggaacagatgctggttagcatgggtcaccaaagcagcggtgcgggcaccctgtggaacttcccgagctggatgcgtaacctggttccgcacgacatcgatggcgacgatcgtccggacagcattgatatggcggcgctggacatctaccgtgatcgtgagcgtggtgtgccgcgttataacgaattccgtcgtaacctgctgatggttccgattagcaaatgggaggacctgaccaacgatgaggaagtgatcgaggcgctgcaggaagtttacggtgacgatattgaaaaactggacctgcaaatcggcctgcacgcggagaagaaaattaagggtttcgcgatcagcgaaaccgcgttctttatttttctgctgattgcgagccgtcgtctggaggcggaccgtttctttaccaccgatttcaacagccgtacctataccgagaagggttttgaatgggtgaacaagaccgaaaccctgaaagacgttatcgatcgttacttcccggaaatgaccgagaaatatatgcgttgcaccagcgcgtttagcgtttggagcagcgacccggatccgaagcactacctgccgctgtatctgcgtccggcgacctaataagctt

SEQ ID NO: 263 - protein, 638 aa, Solanum lycopersicum
MHHHHHHAFSISLPDFVHPQLRHVVAKMSFFDTILFYVVHLVDKFDLWHRLPVLLGAAYLGIRRHLHQRYNLLHVGKVNGKKYDTEEFTYRTADGSCNHPVDHLVGSQGTFFGRNMLPSTSSYALLEPHPVTVASKLLERRKYTDCGGQFNMIACAWLQFMIHDWNDHMEDTEQVELRAPQDVAAGCPLKSFKFLKTKKLPTGSPDLKFGHLNSRTPWWDGSVIYGNNEEGMIRVRRFKDGKLRLSGDGLLEHDDKGIPISGDVRNYWAGYSLLQALFVKEHNAICDMLKEHYPEFDDEKVYRHARLITSAVIAKIHTIDWTLEIVKTDTLMAGMRINWYGLLGKRVKDLLGPKFGPVLSGLVGLKKPRDHGTPYSLTEEFVSVYRMHSLLPDTIVLRDLKSTTSEDKSLPIQDEIPMREMIGKEGEKNLSKIGMEQMLVSMGHQSSGAGTLWNFPSWMRNLVPHDIDGDDRPDSIDMAALDIYRDRERGVPRYNEFRRNLLMVPISKWEDLTNDEEVIEALQEVYGDDIEKLDLQIGLHAEKKIKGFAISETAFFIFLLIASRRLEADRFFTTDFNSRTYTEKGFEWVNKTETLKDVIDRYFPEMTEKYMRCTSAFSVWSSDPDPKHYLPLYLRPAT

SEQ ID NO: 264 - DNA, 1786 bp, Artificial Sequence
  Codon optimized synthetic gene sequence
catatgcaccatcatcaccaccacccggtgctgctgggtgcgatttacctgggtatccgtcgtcacctgcacttccgttataacctgctgcacgtgggtggcgttagcggcaacaactacgacacccagcactacgcgtatcgtaccccggcgggtacctgcaaccacccggacgatcacctgatcggtagccaaggcaccatcattggccgtaacatgccgccaaccaccctgaactatggtctgctggatccgcacccggcggtggttaccagcaagctgctggcgcgtaagagcttcatcgacaccggtaaacagtttaacatgattgcgtgcagctggattcaattcatgatccacgattggattgaccacctggaggataccgaacaggtggagatcggtgttccggatggttacagcagcggttgcccgctgaagaccttcaagttctttaagaccaagaaattccagaccggcagcagccacatgaaattcggttttcaaaacacccgtaccccgtggtgggatggcagcgtgatttatggtaacaacgaaaagggtatgggccgtgttcgtaccttcaaggaaggcaagctgaaaatcagcgaggatggtctgctggaacacgacgagaagggcattccggttagcggtgacgttcgtaacagctgggcgggttacagcctgctgcaggcgctgttcatcaaagaacacaacgcggtgtgcgatatgctgaaggaacactatccggactttgacgatgagcaactgtaccgttatgcgcgtctggtgaccagcgcggttatcgcgaaaattcacaccatcgattggaccgttgagctgctgaagaccgacaccctgctggcgagcatgcgtatcaactggtacggtttcctgggcaagaaattcaaagatagctttggcaacattctgggtccggaactgagcggtctggtgggcctgaaggagccgcgtgaccacggtgttccgtacagcctgaccgaggaatttaccagcgtgtatcgtatgcacgcgctgctgccggaggaactggttctgcgtaacatcaagccgaccaccggcgaggataaatgcccgagcatcctggaaaaggtgccgatgaccgagatgattggtaaacagggcgaaaagcgtctgagcaaaatcggtatggagcagatgctggttagcatgggccaccaaccgtgcggtgcgattaccctgtggaacttcccgacctggctgcgtaacctgatcgcgcacgatattgacggcgaggaacgtccggatccggtggacatcgcgaccatggaagtttaccgtgaccgtgagcgtggtgttgcgcgttataacgaatttcgtcgtaacatgctgatgatcccgattagcaaatgggaggatctgaccgacgatgaggaagtgaacgaagcgctgaaagaggtgtacgacgatgacgttgaaaagctggacctgattgttggcctgcacgcggaaaagaaaatcaagggtttcgcgattagcgagaccgcgttctttatttttgtgattatggcgagccgtcgtctggaggcggaccgtttctttaccaccaacttcaacagcaaaacctataccaaccaaggttttgaatgggtgaacaagaccgagagcctgaaagatgttatcgaccgtcacttcccggaaatgaccaagaactggatgaccagcagcagcgcgtttagcgtttgggatagcatgccggacccgaagaaatacattccgctgtatctgcgttaataagctt

SEQ ID NO: 265 - protein, 591 aa, Medicago truncatula
MHHHHHHPVLLGAIYLGIRRHLHFRYNLLHVGGVSGNNYDTQHYAYRTPAGTCNHPDDHLIGSQGTIIGRNMPPTTLNYGLLDPHPAVVTSKLLARKSFIDTGKQFNMIACSWIQFMIHDWIDHLEDTEQVEIGVPDGYSSGCPLKTFKFFKTKKFQTGSSHMKFGFQNTRTPWWDGSVIYGNNEKGMGRVRTFKEGKLKISEDGLLEHDEKGIPVSGDVRNSWAGYSLLQALFIKEHNAVCDMLKEHYPDFDDEQLYRYARLVTSAVIAKIHTIDWTVELLKTDTLLASMRINWYGFLGKKFKDSFGNILGPELSGLVGLKEPRDHGVPYSLTEEFTSVYRMHALLPEELVLRNIKPTTGEDKCPSILEKVPMTEMIGKQGEKRLSKIGMEQMLVSMGHQPCGAITLWNFPTWLRNLIAHDIDGEERPDPVDIATMEVYRDRERGVARYNEFRRNMLMIPISKWEDLTDDEEVNEALKEVYDDDVEKLDLIVGLHAEKKIKGFAISETAFFIFVIMASRRLEADRFFTTNFNSKTYTNQGFEWVNKTESLKDVIDRHFPEMTKNWMTSSSAFSVWDSMPDPKKYIPLYLR

SEQ ID NO: 266 - DNA, 1896 bp, Artificial Sequence
  Codon optimized synthetic gene sequence
aagcttggatccggctcttctggtagtggagaaaatctatattttcaaggaaagatgagctattttgatgcgttcctgttctacattgttcacctggttgataaactgggtctgtggcaccgctttccggttctgctgggtgtggcgtatctgggcctgcgtcgtcacctgcaccagcgttataacctggtgcacgttggcccgatcaacggtcaaggctacgacaccgatgaattctgctatcgtaccgcggacggtaaatgcaaccacccgagcgataacaccatcggtagccagggcagctttattggccgtaacatgccgccaagcaccagccaatacggtattctggacccgcacccgagcgtggttgcgaccaagctgctggcgcgtaaacgtttcatcgacaacggtgatcagtttaacgtgattgcgtgcagctggatccaattcatgattcacgactgggttgatcacctggaagatacccaccagatcgaactggaagcgccggaggaagtggcgagcggttgcccgctgaagagcttcaaatttctgcgtaccaagaaagttccgaccgacgatcaccacaaaagcggtgcggtgaacacccgtaccccgtggtgggacggtagcgttatctatggcaacgatgaaaccggtatgcgtcgtgtgcgtgttttcaaggacggcaagctgaaaattagcggtgacggcctgctggagcgtgatgaacgtggcgttccgatcagcggtgatattcgtaacagctggagcggtttcagcctgctgcaagcgctgtttgttaaggaacacaacagcgtgtgcgacatgctgaaagagcgttacccggattttgacgatgaaaagctgtatcgtaccgcgcgtctggtgaccgcggcggttatcgcgaaagtgcacaccatcgactggaccattgagctgctgaagaccgataccctgaccgcgggcatgcgtattaactggtacggtttctttggcaagaaagttaaagacatggtgggtgcgcgtttcggcccgctgtttagcggtctggttggcctgaagaaaccgaacgatcacggtgtgccgtacagcctgaccgaggaattcgtgagcgtttatcgtatgcactgcctgctgccggaaaccctgatcctgcgtgacatgaacagcgagaacgtggataaggaaaacccggcgatcgagcgtgaaattccgatgaccgagctgattggtaagaaagcgggcgaaaaggcgagcaaactgggctttgagcagctgctggtgagcatgggccaccaaagctgcggtgcgctgaccctgtggaactacccgaactggatgcgtaacctggttgcgcaggacatcgatggcgaagaccgtccgcacctgatcgatatggcggcgctggagatttaccgtgaccgtgaacgtggtgttccgcgttataacgagttccgtaagaacctgctgatgagcccgattagcaaatgggaggaactgaccgacgatgaggaagcgatcaaagttctgcgtgaggtgtacgaagacgatattgaaaagctggacctgaacgtgggcctgcacgcggaaaagaaaatcaaaggtttcgcgattagcgaaaccgcgttctttatctttctgctggttgcgagccgtcgtctggaagcggatcgtttctttaccaccaactttaacgagaagacctataccaaagagggtctggaatgggttaacaccaccgaaaccctgaaggacgtgattgatcgtcacttcccgcgtctgaccgaccaatggatgcgttgcagcagcgcgtttagcgtttggggtagcgatccgaatccgaagaactgggtgccgctgtatctgcgtagcgcgccgtaatgactcgag

SEQ ID NO: 267 - protein, 1015 aa, Arabidopsis thaliana
MGSSHHHHHHGTKTEEGKLVIWINGDKGYNGLAEVGKKFEKDTGIKVTVEHPDKLEEKFPQVAATGDGPDIIFWAHDRFGGYAQSGLLAEITPDKAFQDKLYPFTWDAVRYNGKLIAYPIAVEALSLIYNKDLLPNPPKTWEEIPALDKELKAKGKSALMFNLQEPYFTWPLIAADGGYAFKYENGKYDIKDVGVDNAGAKAGLTFLVDLIKNKHMNADTDYSIAEAAFNKGETAMTINGPWAWSNIDTSKVNYGVTVLPTFKGQPSKPFVGVLSAGINAASPNKELAKEFLENYLLTDEGLEAVNKDKPLGAVALKSYEEELAKDPRIAATMENAQKGEIMPNIPQMSAFWYAVRTAVINAASGRQTVDEALKDAQTGTDYDIPTTKLGSGSSGSGENLYFQGKMSYFDAFLFYIVHLVDKLGLWHRFPVLLGVAYLGLRRHLHQRYNLVHVGPINGQGYDTDEFCYRTADGKCNHPSDNTIGSQGSFIGRNMPPSTSQYGILDPHPSVVATKLLARKRFIDNGDQFNVIACSWIQFMIHDWVDHLEDTHQIELEAPEEVASGCPLKSFKFLRTKKVPTDDHHKSGAVNTRTPWWDGSVIYGNDETGMRRVRVFKDGKLKISGDGLLERDERGVPISGDIRNSWSGFSLLQALFVKEHNSVCDMLKERYPDFDDEKLYRTARLVTAAVIAKVHTIDWTIELLKTDTLTAGMRINWYGFFGKKVKDMVGARFGPLFSGLVGLKKPNDHGVPYSLTEEFVSVYRMHCLLPETLILRDMNSENVDKENPAIEREIPMTELIGKKAGEKASKLGFEQLLVSMGHQSCGALTLWNYPNWMRNLVAQDIDGEDRPHLIDMAALEIYRDRERGVPRYNEFRKNLLMSPISKWEELTDDEEAIKVLREVYEDDIEKLDLNVGLHAEKKIKGFAISETAFFIFLLVASRRLEADRFFTTNFNEKTYTKEGLEWVNTTETLKDVIDRHFPRLTDQWMRCSSAFSVWGSDPNPKNWVPLYLRSAP

SEQ ID NO: 268 - DNA, 1840 bp, Artificial Sequence
  Codon optimized synthetic gene sequence
catatgcatcatcaccaccaccacgttatccacattctggacaagctggatctgtggcatcgtctgccggtgctgctgggtctggcgtacctgggcatccgtcgtcacctgcaccagcgttataacctgctgcacgttggcgagatcaacggccaaaaatacgataccgaggaaatttgctatcgtaccgcggatggtacctgcaaccacccgagcgacgataccattggtagccagggcaccttctttggtcgtaacatgccgccaagcaccagcacctacggcctgctggatccgcacccgaccgtggttgcgaccaagctgctggcgcgtaagaaattcatcgacaacggtaaacagtttaacatgattgcgtgcagctggatccaattcatgattcacgactggaccgatcacctggaggatagcaagcaagtggaactgaccgcgccggatgaggaaattgcgagcggctgcccgctgaagagctttaaattctttaagaccaaaggtgttccgaccagcaccccgagcgtgaaaaccggcagcctgaacacccgtaccccgtggtgggatgcgagcgttatttatggtaacaacgaggaaggcatgaagcgtgtgcgtaccttcaaagacggcaagctgaaaatcggtggcgatggcctgctggagcacgacgaaaagtggatcccgattagcggtgacattcgtaacttctgggcgggctttaccctgctgcaggcgctgtttgttaaggagcacaacgcggtgtgcgacaagctgaaagatcactacccggacctggacgatgaaaaactgtatcgtcacgcgcgtctggtgaccagcgcggttatcgcgaaggtgcacaccattgattggaccgttgagctgctgaaaaccgacaccctgagcgcgggtatgcgtatcaactggtacggtctgctgggcaagaaattcaaagacctgttcggtcacatctgcggcccgattctgagcggtctggttggcctgaagaaaccgcgtgaccatggtgtgccgtacagcctgaccgaggaattcgcgagcgtgtatcgtatgcacagcctgctgccggataagctgatcctgcgtgacattaacagcaccaaaagcgactatgcgtgcccgccggttcagcaagaggtggcgatgaaggaaatggcgggtaaagagggcgaacgtcgtctgagcaagatcggtatggaacagatgctggttagcatgggtcatcaagcgtgcggtgcggtgaccctgtggaactatccgctgtggatgcgtaacctggttgcgcacgatatcaacggcgaggaccgtccgaacccggtggatatggcggcgctggagatttaccgtgaccgtgaacgtggcgttagccgttataacgaattccgtcgtaacctgctgatgatcccgattagcaaatgggaggatctgaccgacgataaggaagtgatcaaagttctgcaggaagtgtacggtgacgatgtggaaaagatggacctgcaagtgggtctgcacgcggagaagaaaatcaaaggcttcgcgattagcgaaaccgcgttctttatctttctgctgattgcgagccgtcgtctggaggcggatcgtttctttaccaccaactttaacagcaagacctataccgagaaaggcctggaatgggttaacaagaccgagaccctgaaagacgtgatcgatcgtcacttcccggaaatgaccaagaaatggatgcgttgcagcagcgcgtttagcgtttgggacagcgaaccgaaccaaagcaactacattccgctgtatctgcgtctggcgccgtaataagctt

SEQ ID NO: 269 - protein, 609 aa, Citrus sinensis
MHHHHHHVIHILDKLDLWHRLPVLLGLAYLGIRRHLHQRYNLLHVGEINGQKYDTEEICYRTADGTCNHPSDDTIGSQGTFFGRNMPPSTSTYGLLDPHPTVVATKLLARKKFIDNGKQFNMIACSWIQFMIHDWTDHLEDSKQVELTAPDEEIASGCPLKSFKFFKTKGVPTSTPSVKTGSLNTRTPWWDASVIYGNNEEGMKRVRTFKDGKLKIGGDGLLEHDEKWIPISGDIRNFWAGFTLLQALFVKEHNAVCDKLKDHYPDLDDEKLYRHARLVTSAVIAKVHTIDWTVELLKTDTLSAGMRINWYGLLGKKFKDLFGHICGPILSGLVGLKKPRDHGVPYSLTEEFASVYRMHSLLPDKLILRDINSTKSDYACPPVQQEVAMKEMAGKEGERRLSKIGMEQMLVSMGHQACGAVTLWNYPLWMRNLVAHDINGEDRPNPVDMAALEIYRDRERGVSRYNEFRRNLLMIPISKWEDLTDDKEVIKVLQEVYGDDVEKMDLQVGLHAEKKIKGFAISETAFFIFLLIASRRLEADRFFTTNFNSKTYTEKGLEWVNKTETLKDVIDRHFPEMTKKWMRCSSAFSVWDSEPNQSNYIPLYLRLAP

SEQ ID NO: 270 - DNA, 2686 bp, Artificial Sequence
  Codon optimized synthetic gene sequence
catatgcatcaccaccaccaccacgagcgtgacgtgctgttcaaagaaaacctgtttgacgttgataacctgccgaccgcgaacgcgaccatcacctgcgatgcgcgtagccaagtggcgcgtaccgaagacggtacctgcaacattctgagcaacccggcggagggcagcgtttaccgtcgtttcggtcgtaacgtgaacccggcggttacccatggtgaaaccgaagcggataccctgctgagcccgaacccgcgtgaggtgtctaacgttctgatggcgcgtggtgaattcaagccggcgccgagcctgaactttatcgcggcgagctggattcagttcatggtgcacgactgggttgaacatggtccgaacgcggaagcgaacccgatccaagtgccgctgccggcgggtgatgttctgggtagcggcaacctgagcgtgcgtcgtacccaggcggacccgacccgtaccgcggcggaagcgggcaaaccggcgacctaccgtaaccacaacacccactggtgggatggcagccagctgtatggtagcaacaaagacaccaacgataaagtgcgtgcgtttgttgacggcaagctgaaaatcaacccggatggtaccctgccgaccgactttatcagcggcaagccgattaccggtttcaacgaaaactggtgggttggtctgagcatgctgcaccagctgttcaccaaagagcacaacgcgattgcggcgatgctgaagcagaaatacccggataaggacgatcaatggctgtatgatcatgcgcgtctggtgaacgcggcgctgatggcgaaaatccacaccgttgaatggaccccggcggtgattgcgaacccggttaccgagcgtgcgatgtacgcgaactggtggggtctgctgggtagcggtccgaaccgtgataagtatcaggaagaggcgcgtatgctgcaagaagacctggcgagcagcaacagctttgtgctgcgtatcctgggtattgatggtagccaagcgggtagcagcgcgattgaccatgcgctggcgggtattgtgggcagcaccaacccgaacaactacggtgttccgtataccctgaccgaggaattcgtggcggtttaccgtatgcacccgctgatgcgtgacaaagtggatgtttatgacatcggcagcaacatcattagccgtagcgtgccgctgcagaacacccgtgaccgtgatgcggagagcctgctgaacggcgagcacccggaacgtctgtggtacagctttggcatcaccaacccgggtagcctgaccctgaacaactatccgaacttcctgcgtaacctgagcattccgctggttggcaacatcgacctggcgaccattgatgtgctgcgtgaccgtgaacgtggcgttccgcgttacaacgagtttcgtcgtgaaatcggtctgaacccgattaccaaattcgaagatctgaccaccgacccggcgaccctggcgaacctgaaacgtatctatggcaacgatatcgagaagattgacaccctggtgggtatgctggcggaaaccgttcgtccggatggtttcgcgtttggcgagaccgcgttccagatctttattatgaacgcgagccgtcgtctgatgaccgatcgtttttacaccaaggactatcgtccggagatctacaccgcggaaggtctggcgtgggtggaaaacaccaccatggtggacgttctgaaacgtcacaacccggatctggttgacagcctggtgggcgttgagaacgcgttcaagccgtggggtctgaacattccggcggattaccagacctggccggcgaaggcgaaacaagacaacctgtgggtgaacggcgcgctgcgtagccaatatgcggatggtcagctgccgcaactggcggacaccaacaccagcgcgctgctggcgaacaccctgtggaagaaagtgcgtgaagacgttgatgtggttccggcggattacgcgaaaggcatgcaccagcacggtgtgatggcgaaggttaaatttaagccggttgcgggtaacccgtataccggtctgttccagggcgcggatcatggtctgctgcgtctgagcctggcggcggaaccgggcaagaacggctttcaaccgggcctgagctggaaagcgttcgtggacggcaagccgagccgtaacgttgcggcgctgcagagctggaccggtcagggtcaaaactacaacttctttgcgaacgagctgagccagatcgtggatgcgggcctggttgacagcctgcaagtgctgtttgcggcggttagcctgaaaccgacccaactgcgtgtggatcacctggcgaaaattaagcaggacggtcaaagcgtgagcagcgttaaggcgccgacccaggtgtacttcgttccgcgtgcggaagtgcgtagcctgttcagcaccgcggcgcacgattttcgtaacgacctggttaccctgaacgcgggcaccaccctgtacgacgtgtatgcgaccagcatggaagtgaaaaccagcatcattccgagcaccaaccgtagctatgcgcagcaacgtcgtagcagcgcggtgaaggttggcgagctggaactgaccagcccgttcatcgcgagcgcgtttggtgatagcggcgttttctttaaacaccagcgtagcgaggacaagtaataagctt

SEQ ID NO: 271 - protein, 917 aa, Pseudomonas alcaligenes
MHHHHHHSVWVTWPSLVKFGTLGIYAGLITLALERDVLFKENLFDVDNLPTANATITCDARSQVARTEDGTCNILSNPAEGSVYRRFGRNVNPAVTHGETEADTLLSPNPREVSNVLMARGEFKPAPSLNFIAASWIQFMVHDWVEHGPNAEANPIQVPLPAGDVLGSGNLSVRRTQADPTRTAAEAGKPATYRNHNTHWWDGSQLYGSNKDTNDKVRAFVDGKLKINPDGTLPTDFISGKPITGFNENWWVGLSMLHQLFTKEHNAIAAMLKQKYPDKDDQWLYDHARLVNAALMAKIHTVEWTPAVIANPVTERAMYANWWGLLGSGPNRDKYQEEARMLQEDLASSNSFVLRILGIDGSQAGSSAIDHALAGIVGSTNPNNYGVPYTLTEEFVAVYRMHPLMRDKVDVYDIGSNIISRSVPLQNTRDRDAESLLNGEHPERLWYSFGITNPGSLTLNNYPNFLRNLSIPLVGNIDLATIDVLRDRERGVPRYNEFRREIGLNPITKFEDLTTDPATLANLKRIYGNDIEKIDTLVGMLAETVRPDGFAFGETAFQIFIMNASRRLMTDRFYTKDYRPEIYTAEGLAWVENTTMVDVLKRHNPDLVDSLVGVENAFKPWGLNIPADYQTWPAKAKQDNLWVNGALRSQYADGQLPQLADTNTSALLANTLWKKVREDVDVVPADYAKGMHQHGVMAKVKFKPVAGNPYTGLFQGADHGLLRLSLAAEPGKNGFQPGLSWKAFVDGKPSRNVAALQSWTGQGQNYNFFANELSQIVDAGLVDSLQVLFAAVSLKPTQLRVDHLAKIKQDGQSVSSVKAPTQVYFVPRAEVRSLFSTAAHDFRNDLVTLNAGTTLYDVYATSMEVKTSIIPSTNRSYAQQRRSSAVKVGELELTSPFIASAFGDSGVFFKHQRSEDK

SEQ ID NO: 272 - DNA, 2923 bp, Artificial Sequence
  Codon optimized synthetic gene sequence
catatgcaccaccaccaccaccacaccgagaccggtcgtcacgaacagcaatacgagcgttatgaaggtggcagcccggaggcggaacgtcaggttttcgagcgtctggcgcgtgagatcatggaagtgcaagttaagaaccagcgtgcgcaaggtggcggtattagccgtacctttcacgcgaaagcgccgctggcggttgaaaacgcgcgtctgcgtttccatgatgatctgccggaggcgctgcgtgtgggttttgcgcaaccgggtgcggattatccggcgaccgttcgtctgagcaacgcgagcggcgtgcagcaaggtgatggtagcccggatctgcgtggtgcggcggtgcgtgttcgtgtgagcgaggacgaaagccatgatctgctggcgaccagccatccggttagccatgcgcgtgatgcgcgtgaattcgttgcgtttgcgaaagcgatggcgggtgcgcgtagcccgctgcagaaggcgttcggtctgtttgttaaactgccgctggcggtgggtctgggtaccgcgaaccgtatgcgtcgtaacgttcaagcggcggcgcgtcacaccgtggatagcctggcgagcgaaacctattggagccgtggcgcgatcctgtggggcgaggcgggtccggttcgttacctgctgcgtccggcgccgggtagcccgccgccgctgccgtgcgacccgaacgacccggatttcctgcatcgtgaactggcgcagcgtctggcgcgtaccgacatcgcgttcgatctgtgcgttcaacgttttgtggatgagcgtcgtaccccggttgaagacgcgagcgtggagtggcaggaagcgattgcgccggcgcaaccgattgcgcgtctgaccattccgggccaggatctggatgatgcgaaggcgcgtaccgtggcgcgtcgtatcgaagacctggcgttcaacccgtggcacaccaccgacgattttcgtccgctgggtaacattaaccgtgcgcgtaaggcggcgtacggcgcgagcagcgcgcaccgtctgggtctgcgtttcagcaccgcggagccgtggcagaaccgtctgctgaccccgccggcgggtgcggcgtttggtctgctgaaccgtgttctgccgtggcatcgtctgccgctgcgtctgagcctgctgaacctggtgttcctgcgtaaggcgctgcgtcgttttaacctgatcgacaccgagccgcgtgaagctccgccgaaagcgcaaccggttccggagccgattccggaacgtctgcgtaccgaacgtagctacgatggtagctatgacgatctgagcgagccgggtatgggtgcggttggtgcggcgtttggtcgtaacgtgaccccggactatcgtccggacctgtttgataccccgaacccggttaccgtgagccgtcgtctgctgtaccgtgagagcttccaaccggcgaccagcctgaacatcctggcggcggcgtggattcagtttcaagttcacgattgggttaaccatcgtcgtcatcgtccgggcggtcgtaccgttgaggtgccgctgccgccgggtagcggtgattggcacaacaccccgggcggtccgccggaaaacgtgatgcgttttgcggagaacgaaggtctggagctgccgggtgaccgtccgccgatcctgtttggtaacgttgcgagccactggtgggatggcagcgaagtgtatggcgaggacgaacaaaccgcgcgtttcctgcgtgaaccggatggcggtgcgcgtctgcgtctggaggatggtcacctgccgggcggtaccaacggcattccgctgaccggtttcagcgagtcctggtggatgggtctgagcgcgatgcacaccctgtttgcgcgtgaacacaacgcggtttgcgatgcgctgcgtgcggagtacccgagcatgagcgaggaacgtatctatcgtaccgcgcgtctggtggttagcgcgctgatcgcgaagattcacaccgtggaatggaccccggcgattctggcgaccgaggcgatcgacattggtctgcacaccaactggcagggtccgccgcgtaactggctgaacaaactgggcctgtggctgtttgaagcgcatagcctgaccggtatcccgggtacccgtccggatcaccacggtgttccgtacagcctgaccgaggactttgttaccgtgtatcgtatgcacccgctgattccggacgattacgagctgcgtgaacaccacttcggccagcgtctggaaaccgtgggttttctggatatccaaggcggtgcggcggaggcgaagattcgtaaaaccggcctggcgaacaccctgtacagcttcggcatcgcgcacccgggtgcgattaccctgcacaacttcccgcgtagcctgcagcaatttgagcgtgacggtgaaatcattgatctgagcgtggttgacctggttcgtacccgtcgtcgtggtgtgccgcgttataacgacttccgtgcgggtctgcacaagaaacgtatccgtagctttgaggaactgacccgtaacgcggagaccctggcgcgtctgaaggaagtttaccgtagcgttgacgaggtggataccatggttggtctgctggcggaaaacccgccggcgggtttcggttttagcgataccgcgttccgtatctttattctgatggcgacccgtcgtctgcagagcgatcgtttcctgaccgttgactaccgtccggaagtgtataccccgctgggtatcgactgggttgagaaaggcggtatgaacagcgtgattctgcgtcattgcccggagctggcgagcctgatgccgcgtcgtgcgagcgcgtttgcgccgtggcgtaccgtgcaaccggcggcgaacggcggtccgccggataacggcggtccgggtgacaacggttaataagctt

SEQ ID NO: 273 - protein, 970 aa, Streptomyces avermitilis
MHHHHHHTETGRHEQQYERYEGGSPEAERQVFERLAREIMEVQVKNQRAQGGGISRTFHAKAPLAVENARLRFHDDLPEALRVGFAQPGADYPATVRLSNASGVQQGDGSPDLRGAAVRVRVSEDESHDLLATSHPVSHARDAREFVAFAKAMAGARSPLQKAFGLFVKLPLAVGLGTANRMRRNVQAAARHTVDSLASETYWSRGAILWGEAGPVRYLLRPAPGSPPPLPCDPNDPDFLHRELAQRLARTDIAFDLCVQRFVDERRTPVEDASVEWQEAIAPAQPIARLTIPGQDLDDAKARTVARRIEDLAFNPWHTTDDFRPLGNINRARKAAYGASSAHRLGLRFSTAEPWQNRLLTPPAGAAFGLLNRVLPWHRLPLRLSLLNLVFLRKALRRFNLIDTEPREAPPKAQPVPEPIPERLRTERSYDGSYDDLSEPGMGAVGAAFGRNVTPDYRPDLFDTPNPVTVSRRLLYRESFQPATSLNILAAAWIQFQVHDWVNHRRHRPGGRTVEVPLPPGSGDWHNTPGGPPENVMRFAENEGLELPGDRPPILFGNVASHWWDGSEVYGEDEQTARFLREPDGGARLRLEDGHLPGGTNGIPLTGFSESWWMGLSAMHTLFAREHNAVCDALRAEYPSMSEERIYRTARLVVSALIAKIHTVEWTPAILATEAIDIGLHTNWQGPPRNWLNKLGLWLFEAHSLTGIPGTRPDHHGVPYSLTEDFVTVYRMHPLIPDDYELREHHFGQRLETVGFLDIQGGAAEAKIRKTGLANTLYSFGIAHPGAITLHNFPRSLQQFERDGEIIDLSVVDLVRTRRRGVPRYNDFRAGLHKKRIRSFEELTRNAETLARLKEVYRSVDEVDTMVGLLAENPPAGFGFSDTAFRIFILMATRRLQSDRFLTVDYRPEVYTPLGIDWVEKGGMNSVILRHCPELASLMPRRASAFAPWRTVQPAANGGPPDNGGPGDNG

SEQ ID NO: 274 - DNA, 1891 bp, Artificial Sequence
  Codon optimized synthetic gene sequence
catatgcatcatcaccatcatcatgtgaccaccgcgcgtcaagcgccggttctgattgcgaccgcgtggagccgtagccgtagcctgaccgtggcgctggcggcgcgtgttgcgcagcaaatcgatcagaccgtgggttgggcgcgtctgccgaaggcggtgggtctggcggttctgattggcctgcgtcaccaactgcgtaccagcaacctgtatgcggcggagccggcgccggttccgccgggtggcccggtgggtgttggcaactacctgggtgcgcgtacccgtgacggcagctataacgatctggcggatccgcgtatgggtgcggtgggttgccgtttcggtcgtaacgttccgccggagcacagctatccggaaagcccgcaacgtctgctggatccgaacccgcgtctgatcagccgtaccctgctgacccgtgacagctttcaaccggcgaccaccctgaacctgctggcggcggcgtggattcaattcgaggtgcacgattggtttgcgcatggtagcgcggcgacccaaccgtgggtggttccgctgcatgacgatgacccgtggccgcaacgtccgatgcgtgtggaacgtaccgttccggatccgcacccgagcccggtgggtccgccgacctttgttacccaagagagccactggtgggatgcgagccaaatctacggcaccaccccggaactggcgagcgcgctgcgtgcgccggagggtggcaaactgcgtattgatgaaagcggtctgccgccgccggaagtggaagcggttgcggacctgaccggtaccgcgggtaacttctgggttggtctggcgctgctgcacagcctgtttatgctggagcacaacgcgatctgcgatcacctggcggaagcgtacccgtatctgaccggtcagcaactgtacgacaaggcgcgtctggtgaacagcgcgctgatggcgaaaattcacaccgttgactggaccccggcgatcattgcgcatccgaccaccgtgaccgcgatgcacgttaactggttcggtctgctgggcaagaaactgggtggccgtttccgtcgtggttaccgtccgtttggcagcagcccgctgctgtatggtattccgggtagcccgaccacccaccatggtgtgccgtacagcctgaccgaggaatttgtggcggtttatcgtatgcacccgctgatcccggatgagttcacctttcgtagcctggcggatgaccacgttattgcgcagcacgagctgccggaactgagcgtgctgaacgttcgtgcgcgtctgagcgaaaccccgatggcggacctgctgtacagctttggtcgtggtcatccgggtgcgctgagcctgcacaactttccgcgtcacctgcaacacatgcaccgtgtggacggtaccctgattgatctggcgaccatcgacctgattcgttgccgtgagcgtggcgtgccgcgttataacgaattccgtaagctgtttcgtctgaagccggttaaaaccttcgaggaactgaccggtgatgcggcgctggcgaccgagctgcgtgaagcgtacgatgacgatgtggacctggttgatctgctgattggtctgtatgcggagccgaaaccgccgggtttcggctttagcgacaccgcgttccgtgtgtttattctgatggcgacccgtcgtctggaaagcgatcgtttctttaccaccgacttccgtgaggaaacctacaccgtggcgggtatgaagtgggttcaggacaacgatatgcgtagcgttctgctgcgtcactatcgtgaactgaccccggcgctggcgggcgtggcgaacccgtttgcgccgtggaaccgtgttagcccgacccgtaaagcgagcacctaataagctt

SEQ ID NO: 275 - protein, 626 aa, Mycolicibacterium fortuitum
MHHHHHHVTTARQAPVLIATAWSRSRSLTVALAARVAQQIDQTVGWARLPKAVGLAVLIGLRHQLRTSNLYAAEPAPVPPGGPVGVGNYLGARTRDGSYNDLADPRMGAVGCRFGRNVPPEHSYPESPQRLLDPNPRLISRTLLTRDSFQPATTLNLLAAAWIQFEVHDWFAHGSAATQPWVVPLHDDDPWPQRPMRVERTVPDPHPSPVGPPTFVTQESHWWDASQIYGTTPELASALRAPEGGKLRIDESGLPPPEVEAVADLTGTAGNFWVGLALLHSLFMLEHNAICDHLAEAYPYLTGQQLYDKARLVNSALMAKIHTVDWTPAIIAHPTTVTAMHVNWFGLLGKKLGGRFRRGYRPFGSSPLLYGIPGSPTTHHGVPYSLTEEFVAVYRMHPLIPDEFTFRSLADDHVIAQHELPELSVLNVRARLSETPMADLLYSFGRGHPGALSLHNFPRHLQHMHRVDGTLIDLATIDLIRCRERGVPRYNEFRKLFRLKPVKTFEELTGDAALATELREAYDDDVDLVDLLIGLYAEPKPPGFGFSDTAFRVFILMATRRLESDRFFTTDFREETYTVAGMKWVQDNDMRSVLLRHYRELTPALAGVANPFAPWNRVSPTRKAST

SEQ ID NO: 276 - protein, 544 aa, Artificial Sequence
  Consensus sequence
  misc_feature (3)..(3): Xaa can be any naturally occurring amino acid
  misc_feature (20)..(20): Xaa can be any naturally occurring amino acid
  misc_feature (26)..(26): Xaa can be any naturally occurring amino acid
  misc_feature (29)..(29): Xaa can be any naturally occurring amino acid
  misc_feature (31)..(33): Xaa can be any naturally occurring amino acid
  misc_feature (37)..(40): Xaa can be any naturally occurring amino acid
  misc_feature (44)..(44): Xaa can be any naturally occurring amino acid
  misc_feature (50)..(52): Xaa can be any naturally occurring amino acid
  misc_feature (55)..(55): Xaa can be any naturally occurring amino acid
  misc_feature (60)..(60): Xaa can be any naturally occurring amino acid
  misc_feature (68)..(68): Xaa can be any naturally occurring amino acid
  misc_feature (73)..(74): Xaa can be any naturally occurring amino acid
  misc_feature (76)..(78): Xaa can be any naturally occurring amino acid
  misc_feature (87)..(87): Xaa can be any naturally occurring amino acid
  misc_feature (92)..(92): Xaa can be any naturally occurring amino acid
  misc_feature (97)..(98): Xaa can be any naturally occurring amino acid
  misc_feature (109)..(109): Xaa can be any naturally occurring amino acid
  misc_feature (113)..(113): Xaa can be any naturally occurring amino acid
  misc_feature (117)..(117): Xaa can be any naturally occurring amino acid
  misc_feature (124)..(143): Xaa can be any naturally occurring amino acid
  misc_feature (148)..(149): Xaa can be any naturally occurring amino acid
  misc_feature (153)..(153): Xaa can be any naturally occurring amino acid
  misc_feature (159)..(159): Xaa can be any naturally occurring amino acid
  misc_feature (162)..(163): Xaa can be any naturally occurring amino acid
  misc_feature (167)..(167): Xaa can be any naturally occurring amino acid
  misc_feature (172)..(172): Xaa can be any naturally occurring amino acid
  misc_feature (174)..(174): Xaa can be any naturally occurring amino acid
  misc_feature (176)..(192): Xaa can be any naturally occurring amino acid
  misc_feature (197)..(203): Xaa can be any naturally occurring amino acid
  misc_feature (207)..(208): Xaa can be any naturally occurring amino acid
  misc_feature (211)..(211): Xaa can be any naturally occurring amino acid
  misc_feature (214)..(214): Xaa can be any naturally occurring amino acid
  misc_feature (221)..(222): Xaa can be any naturally occurring amino acid
  misc_feature (227)..(227): Xaa can be any naturally occurring amino acid
  misc_feature (229)..(229): Xaa can be any naturally occurring amino acid
  misc_feature (232)..(232): Xaa can be any naturally occurring amino acid
  misc_feature (235)..(235): Xaa can be any naturally occurring amino acid
  misc_feature (237)..(237): Xaa can be any naturally occurring amino acid
  misc_feature (239)..(239): Xaa can be any naturally occurring amino acid
  misc_feature (247)..(247): Xaa can be any naturally occurring amino acid
  misc_feature (254)..(254): Xaa can be any naturally occurring amino acid
  misc_feature (260)..(261): Xaa can be any naturally occurring amino acid
  misc_feature (263)..(263): Xaa can be any naturally occurring amino acid
  misc_feature (268)..(268): Xaa can be any naturally occurring amino acid
  misc_feature (270)..(270): Xaa can be any naturally occurring amino acid
  misc_feature (274)..(274): Xaa can be any naturally occurring amino acid
  misc_feature (281)..(281): Xaa can be any naturally occurring amino acid
  misc_feature (284)..(284): Xaa can be any naturally occurring amino acid
  misc_feature (287)..(287): Xaa can be any naturally occurring amino acid
  misc_feature (293)..(293): Xaa can be any naturally occurring amino acid
  misc_feature (299)..(302): Xaa can be any naturally occurring amino acid
  misc_feature (313)..(323): Xaa can be any naturally occurring amino acid
  misc_feature (325)..(326): Xaa can be any naturally occurring amino acid
  misc_feature (335)..(335): Xaa can be any naturally occurring amino acid
  misc_feature (337)..(337): Xaa can be any naturally occurring amino acid
  misc_feature (341)..(341): Xaa can be any naturally occurring amino acid
  misc_feature (347)..(384): Xaa can be any naturally occurring amino acid
  misc_feature (386)..(386): Xaa can be any naturally occurring amino acid
  misc_feature (389)..(390): Xaa can be any naturally occurring amino acid
  misc_feature (396)..(396): Xaa can be any naturally occurring amino acid
  misc_feature (399)..(399): Xaa can be any naturally occurring amino acid
  misc_feature (404)..(407): Xaa can be any naturally occurring amino acid
  misc_feature (429)..(429): Xaa can be any naturally occurring amino acid
  misc_feature (439)..(439): Xaa can be any naturally occurring amino acid
  misc_feature (450)..(450): Xaa can be any naturally occurring amino acid
  misc_feature (470)..(470): Xaa can be any naturally occurring amino acid
  misc_feature (475)..(476): Xaa can be any naturally occurring amino acid
  misc_feature (484)..(484): Xaa can be any naturally occurring amino acid
  misc_feature (488)..(489): Xaa can be any naturally occurring amino acid
  misc_feature (492)..(492): Xaa can be any naturally occurring amino acid
  misc_feature (499)..(499): Xaa can be any naturally occurring amino acid
  misc_feature (508)..(508): Xaa can be any naturally occurring amino acid
  misc_feature (528)..(528): Xaa can be any naturally occurring amino acid
  misc_feature (531)..(531): Xaa can be any naturally occurring amino acid
  misc_feature (540)..(540): Xaa can be any naturally occurring amino acid
  misc_feature (543)..(543): Xaa can be any naturally occurring amino acid
PVXIGLLYLNTRRTLLEKYXLLAVGXSSXGXXXDPKXXXXYRTXDGKYNXXXNAXAGSQXTFFGRNMXPVDQXXEXXXPDPFVVATXLLARXEYKDXXKQFNILAAAWXQFMXHDWXDHMEDTXXXXXXXXXXXXXXXXXXXXITAPXXVANXCPLKSXKFXXTKEXPTNSXGXIXXXXXXXXXXXXXXXXXYGNNXXXXXXXRTYXXGKXVIXDDGLLLXXENGVXLXGDXRNXWXGXSILQALFXKEHNAVXDAIKEXXPXLSDEXLXRYAXLVTSAVXAKXHTXDWTVEXLKTKTXXXXMRANWYGLLGXXXXXXXXXXXGXXLGGLVGLKXPXNHGXPYSLTXXXXXXXXXXXXXXXXXXXXXXXXXXXXXXXXXXXXXXDXGEXXGLKGEXQLXKIGFXXXXLSMGYQACGALELWNYPSFFRXLIPQNLDGTXRSDRIDLAALXVYRDRERSVPRYNEFRRRLXLIPIXXWEDLTSDXDAIXXIRXIYGDDVXKLDLLVGLXAEKKIKGFAISETAFNIFIXMAXRRLEADRFXTSXF

SEQ ID NO: 277 - protein, 612 aa, Artificial Sequence
  Consensus sequence
  misc_feature (2)..(7): Xaa can be any naturally occurring amino acid
  misc_feature (9)..(15): Xaa can be any naturally occurring amino acid
  misc_feature (17)..(20): Xaa can be any naturally occurring amino acid
  misc_feature (27)..(27): Xaa can be any naturally occurring amino acid
  misc_feature (31)..(31): Xaa can be any naturally occurring amino acid
  misc_feature (33)..(34): Xaa can be any naturally occurring amino acid
  misc_feature (36)..(36): Xaa can be any naturally occurring amino acid
  misc_feature (38)..(38): Xaa can be any naturally occurring amino acid
  misc_feature (42)..(43): Xaa can be any naturally occurring amino acid
  misc_feature (46)..(46): Xaa can be any naturally occurring amino acid
  misc_feature (48)..(48): Xaa can be any naturally occurring amino acid
  misc_feature (50)..(54): Xaa can be any naturally occurring amino acid
  misc_feature (57)..(71): Xaa can be any naturally occurring amino acid
  misc_feature (73)..(73): Xaa can be any naturally occurring amino acid
  misc_feature (78)..(78): Xaa can be any naturally occurring amino acid
  misc_feature (80)..(84): Xaa can be any naturally occurring amino acid
  misc_feature (89)..(89): Xaa can be any naturally occurring amino acid
  misc_feature (98)..(98): Xaa can be any naturally occurring amino acid
  misc_feature (100)..(101): Xaa can be any naturally occurring amino acid
  misc_feature (103)..(104): Xaa can be any naturally occurring amino acid
  misc_feature (106)..(107): Xaa can be any naturally occurring amino acid
  misc_feature (109)..(112): Xaa can be any naturally occurring amino acid
  misc_feature (114)..(114): Xaa can be any naturally occurring amino acid
  misc_feature (117)..(118): Xaa can be any naturally occurring amino acid
  misc_feature (120)..(121): Xaa can be any naturally occurring amino acid
  misc_feature (123)..(124): Xaa can be any naturally occurring amino acid
  misc_feature (126)..(127): Xaa can be any naturally occurring amino acid
  misc_feature (133)..(133): Xaa can be any naturally occurring amino acid
  misc_feature (144)..(163): Xaa can be any naturally occurring amino acid
  misc_feature (165)..(166): Xaa can be any naturally occurring amino acid
  misc_feature (169)..(169): Xaa can be any naturally occurring amino acid
  misc_feature (171)..(176): Xaa can be any naturally occurring amino acid
  misc_feature (178)..(181): Xaa can be any naturally occurring amino acid
  misc_feature (183)..(184): Xaa can be any naturally occurring amino acid
  misc_feature (186)..(191): Xaa can be any naturally occurring amino acid
  misc_feature (193)..(195): Xaa can be any naturally occurring amino acid
  misc_feature (197)..(197): Xaa can be any naturally occurring amino acid
  misc_feature (199)..(199): Xaa can be any naturally occurring amino acid
  misc_feature (201)..(201): Xaa can be any naturally occurring amino acid
  misc_feature (214)..(215): Xaa can be any naturally occurring amino acid
  misc_feature (217)..(218): Xaa can be any naturally occurring amino acid
  misc_feature (220)..(221): Xaa can be any naturally occurring amino acid
  misc_feature (224)..(228): Xaa can be any naturally occurring amino acid
  misc_feature (232)..(232): Xaa can be any naturally occurring amino acid
  misc_feature (235)..(239): Xaa can be any naturally occurring amino acid
  misc_feature (241)..(241): Xaa can be any naturally occurring amino acid
  misc_feature (246)..(249): Xaa can be any naturally occurring amino acid
  misc_feature (251)..(251): Xaa can be any naturally occurring amino acid
  misc_feature (255)..(256): Xaa can be any naturally occurring amino acid
  misc_feature (264)..(264): Xaa can be any naturally occurring amino acid
  misc_feature (266)..(266): Xaa can be any naturally occurring amino acid
  misc_feature (275)..(276): Xaa can be any naturally occurring amino acid
  misc_feature (279)..(279): Xaa can be any naturally occurring amino acid
  misc_feature (281)..(283): Xaa can be any naturally occurring amino acid
  misc_feature (286)..(286): Xaa can be any naturally occurring amino acid
  misc_feature (288)..(289): Xaa can be any naturally occurring amino acid
  misc_feature (291)..(292): Xaa can be any naturally occurring amino acid
  misc_feature (294)..(294): Xaa can be any naturally occurring amino acid
  misc_feature (299)..(300): Xaa can be any naturally occurring amino acid
  misc_feature (310)..(310): Xaa can be any naturally occurring amino acid
  misc_feature (318)..(318): Xaa can be any naturally occurring amino acid
  misc_feature (321)..(321): Xaa can be any naturally occurring amino acid
  misc_feature (323)..(325): Xaa can be any naturally occurring amino acid
  misc_feature (327)..(329): Xaa can be any naturally occurring amino acid
  misc_feature (333)..(333): Xaa can be any naturally occurring amino acid
  misc_feature (337)..(339): Xaa can be any naturally occurring amino acid
  misc_feature (342)..(342): Xaa can be any naturally occurring amino acid
  misc_feature (344)..(349): Xaa can be any naturally occurring amino acid
  misc_feature (351)..(352): Xaa can be any naturally occurring amino acid
  misc_feature (359)..(364): Xaa can be any naturally occurring amino acid
  misc_feature (367)..(368): Xaa can be any naturally occurring amino acid
  misc_feature (379)..(379): Xaa can be any naturally occurring amino acid
  misc_feature (381)..(381): Xaa can be any naturally occurring amino acid
  misc_feature (383)..(383): Xaa can be any naturally occurring amino acid
  misc_feature (386)..(386): Xaa can be any naturally occurring amino acid
  misc_feature (391)..(394): Xaa can be any naturally occurring amino acid
  misc_feature (396)..(396): Xaa can be any naturally occurring amino acid
  misc_feature (398)..(399): Xaa can be any naturally occurring amino acid
  misc_feature (401)..(402): Xaa can be any naturally occurring amino acid
  misc_feature (404)..(405): Xaa can be any naturally occurring amino acid
  misc_feature (407)..(407): Xaa can be any naturally occurring amino acid
  misc_feature (409)..(411): Xaa can be any naturally occurring amino acid
  misc_feature (413)..(423): Xaa can be any naturally occurring amino acid
  misc_feature (425)..(427): Xaa can be any naturally occurring amino acid
  misc_feature (433)..(433): Xaa can be any naturally occurring amino acid
  misc_feature (435)..(435): Xaa can be any naturally occurring amino acid
  misc_feature (439)..(439): Xaa can be any naturally occurring amino acid
  misc_feature (441)..(442): Xaa can be any naturally occurring amino acid
  misc_feature (444)..(444): Xaa can be any naturally occurring amino acid
  misc_feature (446)..(446): Xaa can be any naturally occurring amino acid
  misc_feature (449)..(450): Xaa can be any naturally occurring amino acid
  misc_feature (455)..(455): Xaa can be any naturally occurring amino acid
  misc_feature (459)..(459): Xaa can be any naturally occurring amino acid
  misc_feature (461)..(462): Xaa can be any naturally occurring amino acid
  misc_feature (464)..(464): Xaa can be any naturally occurring amino acid
  misc_feature (466)..(466): Xaa can be any naturally occurring amino acid
  misc_feature (474)..(474): Xaa can be any naturally occurring amino acid
  misc_feature (479)..(479): Xaa can be any naturally occurring amino acid
  misc_feature (482)..(482): Xaa can be any naturally occurring amino acid
  misc_feature (486)..(491): Xaa can be any naturally occurring amino acid
  misc_feature (493)..(495): Xaa can be any naturally occurring amino acid
  misc_feature (498)..(509): Xaa can be any naturally occurring amino acid
  misc_feature (511)..(512): Xaa can be any naturally occurring amino acid
  misc_feature (514)..(516): Xaa can be any naturally occurring amino acid
  misc_feature (519)..(519): Xaa can be any naturally occurring amino acid
  misc_feature (521)..(521): Xaa can be any naturally occurring amino acid
  misc_feature (524)..(525): Xaa can be any naturally occurring amino acid
  misc_feature (530)..(530): Xaa can be any naturally occurring amino acid
  misc_feature (558)..(559): Xaa can be any naturally occurring amino acid
  misc_feature (561)..(564): Xaa can be any naturally occurring amino acid
  misc_feature (567)..(568): Xaa can be any naturally occurring amino acid
  misc_feature (570)..(571): Xaa can be any naturally occurring amino acid
  misc_feature (575)..(578): Xaa can be any naturally occurring amino acid
  misc_feature (580)..(580): Xaa can be any naturally occurring amino acid
  misc_feature (583)..(583): Xaa can be any naturally occurring amino acid
  misc_feature (588)..(588): Xaa can be any naturally occurring amino acid
  misc_feature (590)..(592): Xaa can be any naturally occurring amino acid
  misc_feature (594)..(611): Xaa can be any naturally occurring amino acid
PXXXXXXLXXXXXXXNXXXXWHKLPTXIGVXNXXAXRXELRXXNLXDXYXXXXXQGXXXXXXXXXXXXXXXRXSDGLXNXXXXXKMGCXGMRFGRNVXRXXTXXPXXEXXXXPXPRXXSXXLXXRXXFKPATXLNLLAAAWIQXXXXXXXXXXXXXXXXXXXXLXXGDXWXXXXXXMXXXXTXXDXXXXXXDXXXPXYXNXNTHWWDGSQIYGXXEXXTXXLRXXXXXGKLXVDXXXXXTXLPRDXXXXPXTGFXXNWWLGLEXLXTLFVLEHNXXCDXLXXXYPXWXXEXXFXTARLXXCALMAKIHTXEWTPAILXHPXLXXXMXXXWWGXLGEXXXKLXGXXXXXXEXXSGIPGSXXXXXXAPXXLTEEFVSVYRXHXLXPDXIAFFXXXXGXHXXTXXIXXVXFXXXRXXXXXXXXXXXFXXXFYSFGXNXPGAXTXXNXPXFLXXLHTPXGRHXDXXTXDXLRDRERGXPRYNXFRXLFHXXXXXXFXXXTGXXXXXXXXXXXXYXXDXXXVDXLXGCXXEPLPXGFGFSDTAFRVFILMASRRLKSDRFIAXXWXXXXYSXXGXXWVQXXXXKXVLXRHFPXLXXXLXXXXXXXXXXXXXXXXXXY

SEQ ID NO: 278 - protein, 516 aa, Artificial Sequence
  Consensus sequence
  misc_feature (2)..(7): Xaa can be any naturally occurring amino acid
  misc_feature (9)..(10): Xaa can be any naturally occurring amino acid
  misc_feature (14)..(14): Xaa can be any naturally occurring amino acid
  misc_feature (17)..(19): Xaa can be any naturally occurring amino acid
  misc_feature (22)..(23): Xaa can be any naturally occurring amino acid
  misc_feature (25)..(27): Xaa can be any naturally occurring amino acid
  misc_feature (29)..(29): Xaa can be any naturally occurring amino acid
  misc_feature (31)..(31): Xaa can be any naturally occurring amino acid
  misc_feature (34)..(34): Xaa can be any naturally occurring amino acid
  misc_feature (38)..(38): Xaa can be any naturally occurring amino acid
  misc_feature (41)..(41): Xaa can be any naturally occurring amino acid
  misc_feature (43)..(45): Xaa can be any naturally occurring amino acid
  misc_feature (47)..(47): Xaa can be any naturally occurring amino acid
  misc_feature (50)..(55): Xaa can be any naturally occurring amino acid
  misc_feature (57)..(58): Xaa can be any naturally occurring amino acid
  misc_feature (62)..(62): Xaa can be any naturally occurring amino acid
  misc_feature (65)..(66): Xaa can be any naturally occurring amino acid
  misc_feature (68)..(68): Xaa can be any naturally occurring amino acid
  misc_feature (73)..(74): Xaa can be any naturally occurring amino acid
  misc_feature (81)..(82): Xaa can be any naturally occurring amino acid
  misc_feature (89)..(95): Xaa can be any naturally occurring amino acid
  misc_feature (97)..(98): Xaa can be any naturally occurring amino acid
  misc_feature (100)..(100): Xaa can be any naturally occurring amino acid
  misc_feature (102)..(102): Xaa can be any naturally occurring amino acid
  misc_feature (108)..(112): Xaa can be any naturally occurring amino acid
  misc_feature (114)..(115): Xaa can be any naturally occurring amino acid
  misc_feature (117)..(119): Xaa can be any naturally occurring amino acid
  misc_feature (121)..(121): Xaa can be any naturally occurring amino acid
  misc_feature (123)..(125): Xaa can be any naturally occurring amino acid
  misc_feature (128)..(128): Xaa can be any naturally occurring amino acid
  misc_feature (131)..(131): Xaa can be any naturally occurring amino acid
  misc_feature (145)..(146): Xaa can be any naturally occurring amino acid
  misc_feature (148)..(150): Xaa can be any naturally occurring amino acid
  misc_feature (152)..(153): Xaa can be any naturally occurring amino acid
  misc_feature (156)..(156): Xaa can be any naturally occurring amino acid
  misc_feature (158)..(171): Xaa can be any naturally occurring amino acid
  misc_feature (173)..(174): Xaa can be any naturally occurring amino acid
  misc_feature (176)..(176): Xaa can be any naturally occurring amino acid
  misc_feature (178)..(179): Xaa can be any naturally occurring amino acid
  misc_feature (182)..(191): Xaa can be any naturally occurring amino acid
  misc_feature (194)..(194): Xaa can be any naturally occurring amino acid
  misc_feature (196)..(196): Xaa can be any naturally occurring amino acid
  misc_feature (203)..(203): Xaa can be any naturally occurring amino acid
  misc_feature (206)..(206): Xaa can be any naturally occurring amino acid
  misc_feature (211)..(212): Xaa can be any naturally occurring amino acid
  misc_feature (215)..(217): Xaa can be any naturally occurring amino acid
  misc_feature (219)..(225): Xaa can be any naturally occurring amino acid
  misc_feature (229)..(231): Xaa can be any naturally occurring amino acid
  misc_feature (235)..(235): Xaa can be any naturally occurring amino acid
  misc_feature (237)..(239): Xaa can be any naturally occurring amino acid
  misc_feature (241)..(243): Xaa can be any naturally occurring amino acid
  misc_feature (245)..(246): Xaa can be any naturally occurring amino acid
  misc_feature (249)..(249): Xaa can be any naturally occurring amino acid
  misc_feature (256)..(256): Xaa can be any naturally occurring amino acid
  misc_feature (264)..(264): Xaa can be any naturally occurring amino acid
  misc_feature (270)..(270): Xaa can be any naturally occurring amino acid
  misc_feature (275)..(276): Xaa can be any naturally occurring amino acid
  misc_feature (280)..(280): Xaa can be any naturally occurring amino acid
  misc_feature (282)..(284): Xaa can be any naturally occurring amino acid
  misc_feature (286)..(286): Xaa can be any naturally occurring amino acid
  misc_feature (288)..(288): Xaa can be any naturally occurring amino acid
  misc_feature (292)..(292): Xaa can be any naturally occurring amino acid
  misc_feature (298)..(298): Xaa can be any naturally occurring amino acid
  misc_feature (304)..(304): Xaa can be any naturally occurring amino acid
  misc_feature (331)..(331): Xaa can be any naturally occurring amino acid
  misc_feature (333)..(334): Xaa can be any naturally occurring amino acid
  misc_feature (336)..(336): Xaa can be any naturally occurring amino acid
  misc_feature (339)..(345): Xaa can be any naturally occurring amino acid
  misc_feature (348)..(349): Xaa can be any naturally occurring amino acid
  misc_feature (352)..(352): Xaa can be any naturally occurring amino acid
  misc_feature (354)..(354): Xaa can be any naturally occurring amino acid
  misc_feature (357)..(357): Xaa can be any naturally occurring amino acid
  misc_feature (376)..(376): Xaa can be any naturally occurring amino acid
  misc_feature (379)..(379): Xaa can be any naturally occurring amino acid
  misc_feature (381)..(390): Xaa can be any naturally occurring amino acid
  misc_feature (392)..(393): Xaa can be any naturally occurring amino acid
  misc_feature (395)..(395): Xaa can be any naturally occurring amino acid
  misc_feature (397)..(398): Xaa can be any naturally occurring amino acid
  misc_feature (400)..(400): Xaa can be any naturally occurring amino acid
  misc_feature (411)..(412): Xaa can be any naturally occurring amino acid
  misc_feature (414)..(416): Xaa can be any naturally occurring amino acid
  misc_feature (418)..(418): Xaa can be any naturally occurring amino acid
  misc_feature (423)..(423): Xaa can be any naturally occurring amino acid
  misc_feature (425)..(425): Xaa can be any naturally occurring amino acid
  misc_feature (430)..(430): Xaa can be any naturally occurring amino acid
  misc_feature (436)..(436): Xaa can be any naturally occurring amino acid
  misc_feature (440)..(440): Xaa can be any naturally occurring amino acid
  misc_feature (442)..(442): Xaa can be any naturally occurring amino acid
  misc_feature (444)..(444): Xaa can be any naturally occurring amino acid
  misc_feature (446)..(449): Xaa can be any naturally occurring amino acid
  misc_feature (451)..(451): Xaa can be any naturally occurring amino acid
  misc_feature (453)..(453): Xaa can be any naturally occurring amino acid
  misc_feature (456)..(457): Xaa can be any naturally occurring amino acid
  misc_feature (469)..(469): Xaa can be any naturally occurring amino acid
  misc_feature (473)..(473): Xaa can be any naturally occurring amino acid
  misc_feature (477)..(480): Xaa can be any naturally occurring amino acid
  misc_feature (483)..(484): Xaa can be any naturally occurring amino acid
  misc_feature (487)..(487): Xaa can be any naturally occurring amino acid
  misc_feature (489)..(491): Xaa can be any naturally occurring amino acid
  misc_feature (494)..(499): Xaa can be any naturally occurring amino acid
  misc_feature (505)..(506): Xaa can be any naturally occurring amino acid
  misc_feature (509)..(510): Xaa can be any naturally occurring amino acid
  misc_feature (514)..(514): Xaa can be any naturally occurring amino acid
RXXXXXXEXXDRRXGWXXXPPXXGXXXLXGXRDXLREXNLXDXXXGXPPXXXXXXPXXYLTXRTXXGXYNDLXXPSMGMAXXRFGRNVXXXXXXXEXXPXLXDPNPRXXXXXLXXRXXXFXPXXXLNXLAXAWLQFETRDWFSHXXDXXXMXXIPXPXXXXXXXXXXXXXXIXXPXTXXDPXXXXXXXXXXTFXNXETHWWDXSQXYGSNXXFQXXXRXXXXXXXGKVXXXADGXIXXXPXXXGXXGGXDGWWLGXELMGTIFXREHNAXCDRLXXAYPXWXXXQXFXKARXINAALXAKIHTXEWTPAILGHPTLQIGMRANWFGLAGEXVXXLXGRXXXXXXXSGXXGSXTXHHXAPYSITEDFVTVYRMHPLXPDXYXXXXXXXXXXPXXLXFXXIXGGANSRGVLKXXGXXXCXYSLGXAXPGAVXLHNSPXFMRXFXRXDXXXXDXIXTDXXRSRERGVPRYNXFRRXLRLXXXXSFXXISXGXXXTAXXXXXXYGGDIXXVDXXVGMXGE

What is claimed is:

1. A cleaning composition comprising a fatty acid alpha-dioxygenase, wherein said alpha-dioxygenase comprises a polypeptide sequence having at least about 70% identity to one or more sequences selected from the group consisting of: SEQ ID NO: 1, 2, 3, 4, 5, 6, 7, and functional fragments thereof.

2. The cleaning composition of claim 1, wherein said alpha-dioxygenase comprises a polypeptide sequence having at least about 70% identity to SEQ ID NO: 1 or 2, and their functional fragments.

3. The composition of claim 1, wherein said fatty acid alpha-dioxygenase comprises a polypeptide sequence comprising the amino acids N145, (H/R)157, W213, D214, 5216, Y219, G220, R230, G256, G264, H276, N277, A308, 1(309, H311, W315, F375, Y379, R380, H382, 5435, G437, N448, Y520, G532, F549, F552, R559, and G579; and wherein said positions are numbered with reference to SEQ ID NO: 1.

4. A cleaning composition comprising a fatty acid alpha-dioxygenase, wherein said alpha-dioxygenase comprises a polypeptide sequence having at least about 90% identity to one or more sequences selected from the group consisting of: SEQ ID NO: 1, 2, 3, 4, 5, 6, 7, 15, 16, 17, 18, 19, 20, 21, 22, 23, 24, 25, 26, 27, 28, 29, 30, 31, 32, 33, 34, 35, 36, 37, 38, 39, 40, 41, 42, 43, 44, 45, 46, 47, 48, 49, 50, 51, 52, 53, 54, 55, 56, 57, 58, 71, 72, 73, 74, 75, 76, 77, 78, 79, 80, 81, 82, 83, 84, 85, 86, 87, 88, 89, 90, 91, 92, 93, 94, 95, 96, 97, 98, 99, 100, 101, 102, 103, 104, 105, 106, 107, 108, 109, 110, 111, 112, 113, 114, 115, 116, 117, 118, 119, 120, 121, 122, 123, 124, 125, 126, 127, 128, 129, 130, 131, 132, 133, 134, 135, 136, 137, 138, 139, 140, 141, 142, 143, 144, 145, 146, 147, 148, 149, 150, 151, 152, 153, 154, 155, 156, 157, 158, 159, 160, 161, 162, 163, 164, 165, 166, 167, 168, 169, 170, 171, 172, 173, 174, 175, 176, 177, 178, 179, 180, 181, 182, 183, 184, 185, 186, 187, 188, 189, 190, 191, 192, 193, 194, 195, 196, 197, 198, 199, 200, 201, 202, 203, 204, 205, 206, 207, 208, 209, 210, 211, 212, 213, 214, 215, 216, 217, 218, 219, 220, 221, 222, 223, 224, 225, 226, 227, 228, 229, 230, 231, 232, 233, 234, 235, 236, 237, 238, 239, 240, 241, 242, 243, 244, 245, 246, 247, and their functional fragments thereof.

5. The cleaning composition of claim 4, wherein said alpha-dioxygenase comprises a polypeptide sequence having at least about 90% identity to SEQ ID NO: 1, 2, 15, 16, 17, 18, 19, 20, 21, 22, 23, 24, 25, 26, 27, 28, 29, 30, 31, 32, 33, 34, 35, 36, 37, 38, 39, 40, 41, 42, 43, 44, 45, 46, 47, 48, 49, 50, 51, 52, 53, 54, 55, 56, 57, 58, 59, 60, 61, 62, 63, 64, 65, 66, 67, 68, 69, 70, and their functional fragments thereof.

6. The cleaning composition of claim 4, wherein said alpha-dioxygenase comprises a polypeptide sequence having at least about 90% identity to SEQ ID NO: 1, 15, 16, 17, 18, 19, 20, 21, 22, 23, 24, 25, 26, 27, 28, 29, 30, 31, 32, 33, 34, 35, 36, 37, 38, 39, 40, 41, 42, 43, 44, 45, 46, 47, 48, 49, 50, 51, 52, 53, 54, 55, 56, 57, 58.

7. The cleaning composition of claim 4, wherein said alpha-dioxygenase comprises a polypeptide sequence having at least about 90% identity to SEQ ID NO: 1.

8. The cleaning composition of claim 4, further comprising one or more co-enzymes selected from the group consisting of: fatty-acid peroxidases (EC 1.11.1.3), unspecific peroxygenases (EC 1.11.2.1), plant seed peroxygenases (EC 1.11.2.3), fatty acid peroxygenases (EC1.11.2.4), linoleate diol synthases (EC 1.13.11.44), 5,8-linoleate diol synthases (EC 1.13.11.60 and EC 5.4.4.5), 7,8-linoleate diol synthases (EC 1.13.11.60 and EC 5.4.4.6), 9,14-linoleate diol synthases (EC 1.13.11.B1), 8,11-linoleate diol synthases, oleate diol synthases, other linoleate diol synthases, unspecific monooxygenase (EC 1.14.14.1), alkane 1-monooxygenase (EC 1.14.15.3), oleate 12-hydroxylases (EC 1.14.18.4), fatty acid amide hydrolases (EC 3.5.1.99), fatty acid photodecarboxylases (EC 4.1.1.106), oleate hydratases (EC 4.2.1.53), linoleate isomerases (EC 5.2.1.5), linoleate (10E,12Z)-isomerases (EC 5.3.3.B2), P450 fatty acid decarboxylases (OleT-like), non-heme fatty acid decarboxylases (UndA-like), amylases, lipases, proteases, cellulases, and mixtures thereof; preferably fatty-acid peroxidases (EC 1.11.1.3), unspecific peroxygenases (EC 1.11.2.1), plant seed peroxygenases (EC 1.11.2.3), and fatty acid peroxygenases (EC1.11.2.4), non-heme fatty acid decarboxylases (UndA-like), P450 fatty acid decarboxylases (OleT-like), and mixtures thereof.

9. The cleaning composition according to claim 4, wherein said one or more fatty acid alpha-dioxygenase are present in an amount of from 0.0001 wt % to 1 wt %., based on active protein, by weight of the cleaning composition.

10. The cleaning composition according to claim 4, wherein said one or more fatty acid alpha-dioxygenase are present in an amount of from 0.001 wt % to 0.2 wt %, based on active protein, by weight of the cleaning composition.

11. The cleaning composition according to claim 4, further comprising a surfactant.

12. The cleaning composition according to claim 11, wherein the surfactant is present in an amount of from 1 wt % to 60 wt %, by weight of the cleaning composition.

13. The cleaning composition according to claim 11, wherein said surfactant is selected from the group consisting of anionic surfactants, nonionic surfactants, zwitterionic surfactants, amphoteric surfactants, cationic surfactants, and mixtures thereof.

14. A method of cleaning a surface having disposed thereon a soil comprising fatty acid, said method comprising the steps of:
a. contacting said soil disposed on said surface with a cleaning composition comprising a fatty acid alpha-dioxygenase; wherein said alpha-dioxygenase comprises a polypeptide sequence having at least about 70% identity to one or more sequences selected from the group consisting of: SEQ ID NO: 1, 2, 3, 4, 5, 6, 7, and their functional fragments thereof;
b. converting said fatty acid of said soil on said surface into a material selected from the group consisting of 2-hydroperoxy fatty acids, 2-hydroperoxy fatty acid derivatives, and mixtures thereof.

15. The method according to claim 14, wherein said alpha-dioxygenase comprises a polypeptide sequence having at least about 70% identity to SEQ ID NO: 1 or 2, and their functional fragments.

16. The method according to claim 14, wherein said method further comprises the step of removing said cleaning composition from said surface by rinsing said surface with water.

17. The method according to claim 14, wherein said method further comprises the step of diluting said cleaning composition with water to form a diluted cleaning composition and then contacting said soil on said surface with said diluted cleaning composition.

18. The method according to claim 14, wherein said surface is selected from the group consisting of hair, skin, fabric, dishware, tableware, and household hard surfaces.

19. The method according to claim 14, wherein said fatty acid of said soil is selected from the group consisting of palmitic acid, stearic acid, oleic acid, linoleic acid, and mixtures thereof.

20. The method according to claim 14, wherein said cleaning composition comprises from about 0.01% to about 60%, by weight of said cleaning composition, of said surfactant.
